(19) United States
(12) Patent Application Publication
(10) Pub. No.: US 2023/0407341 A1
(43) Pub. Date: Dec. 21, 2023

(54) Using Truncated Guide RNAs (tru-gRNAs) to Increase Specificity for RNA-Guided Genome Editing

(71) Applicant: The General Hospital Corporation, Boston, MA (US)

(72) Inventors: J. Keith Joung, Winchester, MA (US); Jeffry D. Sander, Ankeny, IA (US); Morgan Maeder, Brookline, MA (US); Yanfang Fu, Malden, MA (US)

(21) Appl. No.: 18/178,675

(22) Filed: Mar. 6, 2023

Related U.S. Application Data
(63) Continuation of application No. 16/572,248, filed on Sep. 16, 2019, now Pat. No. 11,634,731.
Application No. 16/572,248 is a continuation of application No. 15/430,218, filed on Feb. 10, 2017, now Pat. No. 10,415,059.
Application No. 15/430,218 is a continuation of application No. 14/213,723, filed on Mar. 14, 2014, now Pat. No. 9,567,604.
(60) Provisional application No. 61/921,007, filed on Dec. 26, 2013.
(60) Provisional application No. 61/838,148, filed on Jun. 21, 2013.
(60) Provisional application No. 61/838,178, filed on Jun. 21, 2013.
(60) Provisional application No. 61/799,647, filed on Mar. 15, 2013.

(51) Int. Cl. C12N 15/90; C12N 9/22; C12N 15/63; C12N 15/85; C07K 14/005; C07K 14/195; C12N 9/02; C12N 9/10; C12N 9/16; C12N 9/96; C12N 15/01; C12N 15/10; C12N 15/11

(52) U.S. Cl. CPC C12N 15/907; C12N 9/22; C12N 15/63; C12Y 301/21004; C12N 15/85; C07K 14/005; C07K 14/195; C12N 9/0071; C12N 9/1007; C12N 9/16; C12N 9/96; C12N 15/01; C12N 15/102; C12N 15/1031; C12N 15/11; C07K 2319/00; C07K 2319/01; C12N 2710/00033; C12N 2770/00033; C12Y 114/11; C12Y 201/01; C12Y 301/00; C12N 2800/80; C12N 2310/20; C07K 2319/80

(57) ABSTRACT

Methods for increasing specificity of RNA-guided genome editing, e.g., editing using CRISPR/Cas9 systems, using truncated guide RNAs (tru-gRNAs).

### CLAIM OF PRIORITY

[0001] This application is a continuation of U.S. patent application Ser. No. 16/572,248, filed Sep. 16, 2019, which is a continuation of U.S. patent application Ser. No. 15/430,218, filed Feb. 10, 2017, now U.S. Pat. No. 10,415,059, which is a continuation of U.S. patent application Ser. No. 14/213,723, filed on Mar. 14, 2014, now U.S. Pat. No. 9,567,604, which claims the benefit of U.S. patent application Ser. Nos. 61/799,647, filed on Mar. 15, 2013; 61/838,178, filed on Jun. 21, 2013; 61/838,148, filed on Jun. 21, 2013, and 61/921,007, filed on Dec. 26, 2013. The entire contents of the foregoing are hereby incorporated by reference.

### FEDERALLY SPONSORED RESEARCH OR DEVELOPMENT

[0002] This invention was made with Government support under Grant Nos. DP1 GM105378 awarded by the National Institutes of Health. The Government has certain rights in the invention.

### SEQUENCE LISTING

[0003] This application contains a Sequence Listing that has been submitted electronically as an XML file named “40174-0007004_SL.XML.” The XML file, created on Sep. 6, 2023, is 4,059,242 bytes in size. The material in the XML file is hereby incorporated by reference in its entirety.

### TECHNICAL FIELD

[0004] Methods for increasing specificity of RNA-guided genome editing, e.g., editing using CRISPR/Cas9 systems, using truncated guide RNAs (tru-gRNAs).

### BACKGROUND

[0005] Recent work has demonstrated that clustered, regularly interspaced, short palindromic repeats (CRISPR)/CRISPR-associated (Cas) systems (Wiedenheft et al., Nature 482, 331-338 (2012); Horvath et al., Science 327, 167-170 (2010); Terns et al., Curr Opin Microbiol 14, 321-327 (2011)) can serve as the basis for performing genome editing in bacteria, yeast and human cells, as well as in vivo in whole organisms such as fruit flies, zebrafish and mice (Wang et al., Cell 153, 910-918 (2013); Shen et al., Cell Res (2013); Dicarlo et al., Nucleic Acids Res (2013); Jiang et 25 al., Nat Biotechnol 31, 233-239 (2013); Jinek et al., Elife 2, e00471 (2013); Hwang et al., Nat Biotechnol 31, 227-229 (2013); Cong et al., Science 339, 819-823 (2013); Mali et al., Science 339, 823-826 (2013c); Cho et al., Nat Biotechnol 31, 230-232 (2013); Gratz et al., Genetics 194(4):1029-35 (2013)). The Cas9 nuclease from S. pyogenes (hereafter simply Cas9) can be guided via base pair complementarity between the first 20 nucleotides of an engineered guide RNA (gRNA) and the complementary strand of a target genomic DNA sequence of interest that lies next to a protospacer adjacent motif (PAM), e.g., a PAM matching the sequence NGG or NAG (Shen et al., Cell Res (2013); Dicarlo et al., Nucleic Acids Res (2013); Jiang et al., Nat Biotechnol 31, 233-239 (2013); Jinek et al., Elife 2, e00471 (2013); Hwang et al., Nat Biotechnol 31, 227-229 (2013); Cong et al., Science 339, 819-823 (2013); Mali et al., Science 339, 823-826 (2013c); Cho et al., Nat Biotechnol 31, 230-232 (2013); Jinek et al., Science 337, 816-821 (2012)). Previous studies performed in vitro (Jinek et al., Science 337, 816-821 (2012)), in bacteria (Jiang et al., Nat Biotechnol 31, 233-239 (2013)) and in human cells (Cong et al., Science 339, 819-823 (2013)) have shown that Cas9-mediated cleavage can, in some cases, be abolished by single mismatches at the gRNA/target site interface, particularly in the last 10-12 nucleotides (nts) located in the 3′ end of the 20 nt gRNA complementarity region.

### SUMMARY

[0006] CRISPR-Cas genome editing uses a guide RNA, which includes both a complementarity region (which binds the target DNA by base-pairing) and a Cas9-binding region, to direct a Cas9 nuclease to a target DNA (see FIG. 1). The nuclease can tolerate a number of mismatches (up to five, as shown herein) in the complementarity region and still cleave; it is hard to predict the effects of any given single or combination of mismatches on activity. Taken together, these nucleases can show significant off-target effects but it can be challenging to predict these sites. Described herein are methods for increasing the specificity of genome editing using the CRISPR/Cas system, e.g., using Cas9 or Cas9-based fusion proteins. In particular, provided are truncated guide RNAs (tru-gRNAs) that include a shortened target complementarity region (i.e., less than 20 nts, e.g., 17-19 or 17-18 nts of target complementarity, e.g., 17, 18 or 19 nts of target complementarity), and methods of using the same. As used herein, “17-18 or 17-19” includes 17, 18, or 19 nucleotides.

[0007] In one aspect, the invention provides a guide RNA molecule (e.g., a single guide RNA or a crRNA) having a target complementarity region of 17-18 or 17-19 nucleotides, e.g., the target complementarity region consists of 17-18 or 17-19 nucleotides, e.g., the target complementarity region consists of 17-18 or 17-19 nucleotides of consecutive target complementarity. In some embodiments, the guide RNA includes a complementarity region consisting of 17-18 or 17-19 nucleotides that are complementary to 17-18 or 17-19 consecutive nucleotides of the complementary strand of a selected target genomic sequence. In some embodiments, the target complementarity region consists of 17-18 nucleotides (of target complementarity). In some embodiments, the complementarity region is complementary to 17 consecutive nucleotides of the complementary strand of a selected target sequence. In some embodiments, the complementarity region is complementary to 18 consecutive nucleotides of the complementary strand of a selected target sequence.

[0008] In another aspect, the invention provides a ribonucleic acid consisting of the sequence:

(SEQ ID NO: 2404)
(X₁₇₋₁₈ or X₁₇₋₁₉)GUUUUAGAGCUA;
(SEQ ID NO: 2407)
(X₁₇₋₁₈ or X₁₇₋₁₉)GUUUUAGAGCUAUGCUGUUUUG;
or
(SEQ ID NO: 2408)
(X₁₇₋₁₈ or X₁₇₋₁₉)GUUUUAGAGCUAUGCU;
(SEQ ID NO: 1)
(X₁₇₋₁₈ or X₁₇₋₁₉)GUUUUAGAGCUAGAAAUAGCAAGUUAAAAUAA
GGCUAGUCCG(X_{N});
(SEQ ID NO: 2)
(X₁₇₋₁₈ or X₁₇₋₁₉)GUUUUAGAGCUAUGCUGAAAAGCAUAGCAAGU
UAAAAUAAGGCUAGUCCGUUAUC(X_{N});
(SEQ ID NO: 3)
(X₁₇₋₁₈ or X₁₇₋₁₉)GUUUUAGAGCUAUGCUGUUUUGGAAACAAAAC
AGCAUAGCAAGUUAAAAUAAGGCUAGUCCGUUAUC(X_{N});
(SEQ ID NO: 4)
(X₁₇₋₁₈)GUUUUAGAGCUAGAAAUAGCAAGUUAAAAUAAGGCUAGUCCG
UUAUCAACUUGAAAAAGUGGCACCGAGUCGGUGC(X_{N}),
(SEQ ID NO: 5)
(X₁₇₋₁₈ or X1₇₋₁₉)GUUUAAGAGCUAGAAAUAGCAAGUUUAAAUAA
GGCUAGUCCGUUAUCAACUUGAAAAAGUGGCACCGAGUCGGUGC;
(SEQ ID NO: 6)
(X₁₇₋₁₈ or X₁₇₋₁₉)GUUUUAGAGCUAUGCUGGAAACAGCAUAGCAA
GUUUAAAUAAGGCUAGUCCGUUAUCAACUUGAAAAAGUGGCACCGAGUCG
GUGC;
or
(SEQ ID NO: 7)
(X₁₇₋₁₈ or X₁₇₋₁₉)GUUUAAGAGCUAUGCUGGAAACAGCAUAGCAA
GUUUAAAUAAGGCUAGUCCGUUAUCAACUUGAAAAAGUGGCACCGAGUCG
GUGC;

wherein X₁₇₋₁₈ or X₁₇₋₁₉ is a sequence (of 17-18 or 17-19 nucleotides) complementary to the complementary strand of a selected target sequence, preferably a target sequence immediately 5′ of a protospacer adjacent motif (PAM), e.g., NGG NAG or NNGG (see, for example, the configuration in FIG. 1), and X_{N} is any sequence, wherein N (in the RNA) can be 0-200, e.g., 0-100, 0-50, or 0-20, that does not interfere with the binding of the ribonucleic acid to Cas9. In no case is the X₁₇₋₁₈ or X₁₇₋₁₉ identical to a sequence that naturally occurs adjacent to the rest of the RNA. In some embodiments the RNA includes one or more U, e.g., 1 to 8 or more Us (e.g., U, UU, UUU, UUUU, UUUUU, UUUUUU, UUUUUUU, UUUUUUUU) at the 3′ end of the molecule, as a result of the optional presence of one or more Ts used as a termination signal to terminate RNA PolIII transcription. In some embodiments the RNA includes one or more, e.g., up to 3, e.g., one, two, or three, additional nucleotides at the 5′ end of the RNA molecule that is not complementary to the target sequence. In some embodiments, the target complementarity region consists of 17-18 nucleotides (of target complementarity). In some embodiments, the complementarity region is complementary to 17 consecutive nucleotides of the complementary strand of a selected target sequence. In some embodiments, the complementarity region is complementary to 18 consecutive

[0009] In another aspect, the invention provides DNA molecules encoding the ribonucleic acids described herein, and host cells harboring or expressing the ribonucleic acids or vectors.

[0010] In a further aspect, the invention provides methods for increasing specificity of RNA-guided genome editing in a cell, the method comprising contacting the cell with a guide RNA that includes a complementarity region consisting of 17-18 or 17-19 nucleotides that are complementary to 17-18 or 17-19 consecutive nucleotides of the complementary strand of a selected target genomic sequence, as described herein.

[0011] In yet another aspect, the invention provides methods for inducing a single or double-stranded break in a target region of a double-stranded DNA molecule, e.g., in a genomic sequence in a cell. The methods include expressing in or introducing into the cell: a Cas9 nuclease or nickase; and a guide RNA that includes a sequence consisting of 17 or 18 or 19 nucleotides that are complementary to the complementary strand of a selected target sequence, preferably a target sequence immediately 5′ of a protospacer adjacent motif (PAM), e.g., NGG NAG or NNGG e.g., a ribonucleic acid as described herein.

[0012] Also provided herein are methods for modifying a target region of a double-stranded DNA molecule in a cell. The methods include expressing in or introducing into the cell: a dCas9-heterologous functional domain fusion protein (dCas9-HFD); and a guide RNA that includes a complementarity region consisting of 17-18 or 17-19 nucleotides that are complementary to 17-18 or 17-19 consecutive nucleotides of the complementary strand of a selected target genomic sequence, as described herein.

[0013] In some embodiments, the guide RNA is (i) a single guide RNA that includes a complementarity region consisting of 17-18 or 17-19 nucleotides that are complementary to 17-18 or 17-19 consecutive nucleotides of the complementary strand of a selected target genomic sequence, or (ii) a crRNA that includes a complementarity region consisting of 17-18 or 17-19 nucleotides that are complementary to 17-18 or 17-19 consecutive nucleotides of the complementary strand of a selected target genomic sequence, and a tracrRNA.

[0014] In some embodiments, the target complementarity region consists of 17-18 nucleotides (of target complementarity). In some embodiments, the complementarity region is complementary to 17 consecutive nucleotides of the complementary strand of a selected target sequence. In some embodiments, the complementarity region is complementary to 18 consecutive

[0015] In no case is the X₁₇₋₁₈ or X₁₇₋₁₉ of any of the molecules described herein identical to a sequence that naturally occurs adjacent to the rest of the RNA. In some embodiments the RNA includes one or more U, e.g., 1 to 8 or more Us (e.g., U, UU, UUU, UUUU, UUUUU, UUUUUU, UUUUUUU, UUUUUUUU) at the 3′ end of the molecule, as a result of the optional presence of one or more Ts used as a termination signal to terminate RNA PolIII transcription. In some embodiments the RNA includes one or more, e.g., up to 3, e.g., one, two, or three, additional nucleotides at the 5′ end of the RNA molecule that is not complementary to the target sequence.

[0016] In some embodiments, one or more of the nucleotides of the RNA is modified, e.g., locked (2′-O-4′-C methylene bridge), is 5′-methylcytidine, is 2′-O-methyl-pseudouridine, or in which the ribose phosphate backbone has been replaced by a polyamide chain, e.g., one or more of the nucleotides within or outside the target complementarity region X₁₇₋₁₈ or X₁₇₋₁₉. In some embodiments, some or all of the tracrRNA or crRNA, e.g., within or outside the X₁₇₋₁₈ or X₁₇₋₁₉ target complementarity region, comprises deoxyribonucleotides (e.g., is all or partially DNA, e.g. DNA/RNA hybrids).

[0017] In an additional aspect, the invention provides methods for modifying a target region of a double-stranded DNA molecule, e.g., in a genomic sequence in a cell. The methods include expressing in or introducing into the cell:
[0018] a dCas9-heterologous functional domain fusion protein (dCas9-HFD); and
[0019] a guide RNA that includes a sequence consisting of 17-18 or 17-19 nucleotides that are complementary to the complementary strand of a selected target sequence, preferably a target sequence immediately 5′ of a protospacer adjacent motif (PAM), e.g., NGG NAG or NNGG e.g., a ribonucleic acid as described herein. In no case is the X₁₇₋₁₈ or X₁₇₋₁₉ identical to a sequence that naturally occurs adjacent to the rest of the RNA. In some embodiments the RNA includes one or more, e.g., up to 3, e.g., one, two, or three, additional nucleotides at the 5′ end of the RNA molecule that is not complementary to the target sequence.

[0020] In another aspect, the invention provides methods for modifying, e.g., introducing a sequence specific break into, a target region of a double-stranded DNA molecule, e.g., in a genomic sequence in a cell. The methods include expressing in or introducing into the cell: a Cas9 nuclease or nickase, or a dCas9-heterologous functional domain fusion protein (dCas9-HFD);
[0021] a tracrRNA, e.g., comprising or consisting of the sequence GGAACCAUUCAAAACAGCAUAGCAAGUUAAAAUAAGGCUAGUCCGUUA UCAACUUGAAAAAGUGGCACCGAGUCGGUGC (SEQ ID NO:8) or an active portion thereof;
[0022] UAGCAAGUUAAAAUAAGGCUAGUCCGUUAUCAACUUGAAAAAGUGGCA CCGAGUCGGUGC (SEQ ID NO:2405) or an active portion thereof;
[0023] AGCAUAGCAAGUUAAAAUAAGGCUAGUCCGUUAUCAACUUGAAAAAGU GGCACCGAGUCGGUGC (SEQ ID NO:2407) or an active portion thereof;
[0024] CAAAACAGCAUAGCAAGUUAAAAUAAGGCUAGUCCGUUAUCAACUUGA AAAAGUGGCACCGAGUCGGUGC (SEQ ID NO:2409) or an active portion thereof;
[0025] UAGCAAGUUAAAAUAAGGCUAGUCCGUUAUCAACUUGAAAAAGUG (SEQ ID NO:2410) or an active portion thereof;
[0026] UAGCAAGUUAAAAUAAGGCUAGUCCGUUAUCA (SEQ ID NO:2411) or an active portion thereof; or
[0027] UAGCAAGUUAAAAUAAGGCUAGUCCG (SEQ ID NO:2412) or an active portion thereof; and
[0028] a crRNA that includes a sequence consisting of 17-18 or 17-19 nucleotides that are complementary to the complementary strand of a selected target sequence, preferably a target sequence immediately 5′ of a protospacer adjacent motif (PAM), e.g., NGG, NAG, or NNGG; in some embodiments the crRNA has the sequence:

(SEQ ID NO: 2404)
(X₁₇₋₁₈ or X₁₇₋₁₉)GUUUUAGAGCUA;
(SEQ ID NO: 2407)
(X₁₇₋₁₈ or X₁₇₋₁₉) GUUUUAGAGCUAUGCUGUUUUG;
or
(SEQ ID NO: 2408)
(X₁₇₋₁₈ or X₁₇₋₁₉)GUUUUAGAGCUAUGCU.

[0029] In some embodiments the crRNA is (X₁₇₋₁₈ or X₁₇₋₁₉)GUUUUAGAGCUAUGCUGUUUUG (SEQ ID NO:2407) and the tracrRNA is GGAACCAUUCAAAACAGCAUAGCAAGUUAAAAUAAGGCUAGUCCGUUA UCAACUUGAAAAAGUGGCACCGAGUCGGUGC (SEQ ID NO:8); the cRNA is (X₁₇₋₁₈ or X₁₇₋₁₉)GUUUUAGAGCUA (SEQ ID NO:2404) and the tracrRNA is UAGCAAGUUAAAAUAAGGCUAGUCCGUUAUCAACUUGAAAAAGUGGCA CCGAGUCGGUGC (SEQ ID NO:2405); or the cRNA is (X₁₇₋₁₈ or X₁₇₋₁₉) GUUUUAGAGCUAUGCU (SEQ ID NO:2408) and the tracrRNA is

(SEQ ID NO: 2406)
AGCAUAGCAAGUUAAAAUAAGGCUAGUCCGUUAUCAACUUGAAAAAGUGGC
ACCGAGUCGGUGC.

[0030] In no case is the X₁₇₋₁₈ or X₁₇₋₁₉ identical to a sequence that naturally occurs adjacent to the rest of the RNA. In some embodiments the RNA (e.g., tracrRNA or crRNA) includes one or more U, e.g., 2 to 8 or more Us (e.g., U, UU, UUU, UUUU, UUUUU, UUUUUU, UUUUUUU, UUUUUUUU) at the 3′ end of the molecule, as a result of the optional presence of one or more Ts used as a termination signal to terminate RNA PolIII transcription. In some embodiments the RNA (e.g., tracrRNA or crRNA) includes one or more, e.g., up to 3, e.g., one, two, or three, additional nucleotides at the 5′ end of the RNA molecule that is not complementary to the target sequence. In some embodiments, one or more of the nucleotides of the crRNA or tracrRNA is modified, e.g., locked (2′-O-4′-C methylene bridge), is 5′-methylcytidine, is 2′-O-methyl-pseudouridine, or in which the ribose phosphate backbone has been replaced by a polyamide chain, e.g., one or more of the nucleotides within or outside the sequence X₁₇₋₁₈ or X₁₇₋₁₉. In some embodiments, some or all of the tracrRNA or crRNA, e.g., within or outside the X₁₇₋₁₈ or X₁₇₋₁₉ target complementarity region, comprises deoxyribonucleotides (e.g., is all or partially DNA, e.g. DNA/RNA hybrids).

[0031] In some embodiments, the dCas9-heterologous functional domain fusion protein (dCas9-HFD) comprises a HFD that modifies gene expression, histones, or DNA, e.g., transcriptional activation domain, transcriptional repressors (e.g., silencers such as Heterochromatin Protein 1 (HP1), e.g., HP1α or HP1β), enzymes that modify the methylation state of DNA (e.g., DNA methyltransferase (DNMT) or TET proteins, e.g., TET1), or enzymes that modify histone subunit (e.g., histone acetyltransferases (HAT), histone deacetylases (HDAC), or histone demethylases). In preferred embodiments, the heterologous functional domain is a transcriptional activation domain, e.g., a VP64 or NF-κB p65 transcriptional activation domain; an enzyme that catalyzes DNA demethylation, e.g., a TET protein family member or the catalytic domain from one of these family members; or histone modification (e.g., LSD1, histone methyltransferase, HDACs, or HATs) or a transcription silencing domain, e.g., from Heterochromatin Protein 1 (HP1), e.g., HP1α or HP1β; or a biological tether, e.g., MS2, CRISPR/Cas Subtype Ypest protein 4 (Csy4) or lambda N protein. dCas9-HFD are described in a U.S. Provisional patent application U.S. Ser. No. 61/799,647, Filed on Mar. 15, 2013, Attorney docket no. 00786-0882P02, U.S. Ser. No. 61/838,148, filed on Jun. 21, 2013, and PCT International Application No. PCT/US14/27335, all of which are incorporated herein by reference in its entirety.

[0032] In some embodiments, the methods described herein result in an indel mutation or sequence alteration in the selected target genomic sequence.

[0033] In some embodiments, the cell is a eukaryotic cell, e.g., a mammalian cell, e.g., a human cell.

[0034] Unless otherwise defined, all technical and scientific terms used herein have the same meaning as commonly understood by one of ordinary skill in the art to which this invention belongs. Methods and materials are described herein for use in the present invention; other, suitable methods and materials known in the art can also be used. The materials, methods, and examples are illustrative only and not intended to be limiting. All publications, patent applications, patents, sequences, database entries, and other references mentioned herein are incorporated by reference in their entirety. In case of conflict, the present specification, including definitions, will control.

[0035] Other features and advantages of the invention will be apparent from the following detailed description and figures, and from the claims.

### DESCRIPTION OF DRAWINGS

[0036] FIG. 1: Schematic illustrating a gRNA/Cas9 nuclease complex bound to its target DNA site. Scissors indicate approximate cleavage points of the Cas9 nuclease on the genomic DNA target site. Note the numbering of nucleotides on the guide RNA proceeds in an inverse fashion from 5′ to 3′. Figure discloses SEQ ID NOS 2691-2693, respectively, in order of appearance.

[0037] FIG. 2A: Schematic illustrating a rationale for truncating the 5′ complementarity region of a gRNA. Thick grey lines=target DNA site, thin dark grey line structure=gRNA, black lines show base pairing (or lack thereof) between gRNA and target DNA site.

[0038] FIG. 2B: Schematic overview of the EGFP disruption assay. Repair of targeted Cas9-mediated double-stranded breaks in a single integrated EGFP-PEST reporter gene by error-prone NHEJ-mediated repair leads to frame-shift mutations that disrupt the coding sequence and associated loss of fluorescence in cells.

[0039] FIGS. 2C-F: Activities of RNA-guided nucleases (RGNs) harboring single guide RNAs (gRNAs) bearing (C) single mismatches, (D) adjacent double mismatches, (E) variably spaced double mismatches, and (F) increasing numbers of adjacent mismatches assayed on three different target sites in the EGFP reporter gene sequence. Mean activities of replicates are shown, normalized to the activity of a perfectly matched single gRNA. Error bars indicate standard errors of the mean. Positions mismatched in each single gRNA are highlighted in grey in the grid below. Sequences of the three EGFP target sites were as follows:

| (SEQ ID NO: 9) | |
|---|---|
| EGFP Site 1 | GGGCACGGGCAGCTTGCCGGTGG |
| (SEQ ID NO: 10) | |
| EGFP Site 2 | GATGCCGTTCTTCTGCTTGTCGG |
| (SEQ ID NO: 11) | |
| EGFP Site 3 | GGTGGTGCAGATGAACTTCAGGG |

[0040] FIG. 2G: Mismatches at the 5′ end of the gRNA make CRISPR/Cas more sensitive more 3′ mismatches. The gRNAs Watson-Crick base pair between the RNA&DNA with the exception of positions indicated with an “m” which are mismatched using the Watson-Crick transversion (i.e., EGFP Site #2 M18-19 is mismatched by changing the gRNA to its Watson-Crick partner at positions 18 & 19. Although positions near the 5′ of the gRNA are generally very well tolerated, matches in these positions are important for nuclease activity when other residues are mismatched. When all four positions are mismatched, nuclease activity is no longer detectable. This further demonstrates that matches at these 5′ position can help compensate for mismatches at other more 3′ positions. Note these experiments were performed with a non-codon optimized version of Cas9 which can show lower absolute levels of nuclease activity as compared to the codon optimized version.

[0041] FIG. 2H: Efficiency of Cas9 nuclease activities directed by gRNAs bearing variable length complementarity regions ranging from 15 to 25 nts in a human cell-based U2OS EGFP disruption assay. Expression of a gRNA from the U6 promoter requires the presence of a 5′ G and therefore it was only possible to evaluate gRNAs harboring certain lengths of complementarity to the target DNA site (15, 17, 19, 20, 21, 23, and 25 nts). Figure discloses SEQ ID NOS 2694-2700, respectively, in order of appearance.

[0042] FIG. 3A: Efficiencies of EGFP disruption in human cells mediated by Cas9 and full-length or shortened gRNAs for four target sites in the EGFP reporter gene. Lengths of complementarity regions and corresponding target DNA sites are shown. Ctrl=control gRNA lacking a complementarity region. Figure discloses SEQ ID NOS 2701, 9, 2702, 10, 2703-2704, 11 and 2705-2707, respectively, in order of appearance.

[0043] FIG. 3B: Efficiencies of targeted indel mutations introduced at seven different human endogenous gene targets by matched standard RGNs (Cas9 and standard full-length gRNAs) and tru-RGNs (Cas9 and gRNAs bearing truncations in their 5′ complementarity regions). Lengths of gRNA complementarity regions and corresponding target DNA sites are shown. Indel frequencies were measured by T7EI assay. Ctrl=control gRNA lacking a complementarity region. Figure discloses SEQ ID NOS 2708-2721, respectively, in order of appearance.

[0044] FIG. 3C: DNA sequences of indel mutations induced by RGNs using a tru-gRNA or a matched full-length gRNA targeted to the EMX1 site. The portion of the target DNA site that interacts with the gRNA complementarity region is highlighted in grey with the first base of the PAM sequence shown in lowercase. Deletions are indicated by dashes highlighted in grey and insertions by italicized letters highlighted in grey. The net number of bases deleted or inserted and the number of times each sequence was isolated are shown to the right. Figure discloses SEQ ID NOS 2722-2754, respectively, in order of appearance.

[0045] FIG. 3D: Efficiencies of precise HDR/ssODN-mediated alterations introduced at two endogenous human genes by matched standard and tru-RGNs. % HDR was measured using a BamHI restriction digest assay (see the Experimental Procedures for Example 2). Control gRNA=empty U6 promoter vector.

[0046] FIG. 3E: U2OS.EGFP cells were transfected with variable amounts of full-length gRNA expression plasmids (top) or tru-gRNA expression plasmids (bottom) together with a fixed amount of Cas9 expression plasmid and then assayed for percentage of cells with decreased EGFP expression. Mean values from duplicate experiments are shown with standard errors of the mean. Note that the data obtained with tru-gRNA matches closely with data from experiments performed with full-length gRNA expression plasmids instead of tru-gRNA plasmids for these three EGFP target sites.

[0047] FIG. 3F: U2OS.EGFP cells were transfected with variable amount of Cas9 expression plasmid together with fixed amounts of full-length gRNA expression plasmids (top) or tru-gRNA expression plasmids (bottom) for each target (amounts determined for each tru-gRNA from the experiments of FIG. 3E). Mean values from duplicate experiments are shown with standard errors of the mean. Note that the data obtained with tru-gRNA matches closely with data from experiments performed with full-length gRNA expression plasmids instead of tru-gRNA plasmids for these three EGFP target sites. The results of these titrations determined the concentrations of plasmids used in the EGFP disruption assays performed in Examples 1 and 2.

[0048] FIG. 4A: Schematic illustrating locations of VEGFA sites 1 and 4 targeted by gRNAs for paired double nicks. Target sites for the full-length gRNAs are underlined with the first base in the PAM sequence shown in lowercase. Location of the BamHI restriction site inserted by HDR with a ssODN donor is shown. Figure discloses SEQ ID NOS 2755-2756, respectively, in order of appearance.

[0049] FIG. 4B: A tru-gRNA can be used with a paired nickase strategy to efficiently induce indel mutations. Substitution of a full-length gRNA for VEGFA site 1 with a tru-gRNA does not reduce the efficiency of indel mutations observed with a paired full-length gRNA for VEGFA site 4 and Cas9-D10A nickases. Control gRNA used is one lacking a complementarity region.

[0050] FIG. 4C: A tru-gRNA can be used with a paired nickase strategy to efficiently induce precise HDR/ssODN-mediated sequence alterations. Substitution of a full-length gRNA for VEGFA site 1 with a tru-gRNA does not reduce the efficiency of indel mutations observed with a paired full-length gRNA for VEGFA site 4 and Cas9-D10A nickases with an ssODN donor template. Control gRNA used is one lacking a complementarity region.

[0051] FIG. 5A: Activities of RGNs targeted to three sites in EGFP using full-length (top) or tru-gRNAs (bottom) with single mismatches at each position (except at the 5′-most base which must remain a G for efficient expression from the U6 promoter). Grey boxes in the grid below represent positions of the Watson-Crick transversion mismatches. Empty gRNA control used is a gRNA lacking a complementarity region. RGN activities were measured using the EGFP disruption assay and values shown represent the percentage of EGFP-negative observed relative to an RGN using a perfectly matched gRNA. Experiments were performed in duplicate and means with error bars representing standard errors of the mean are shown.

[0052] FIG. 5B: Activities of RGNs targeted to three sites in EGFP using full-length (top) or tru-gRNAs (bottom) with adjacent double mismatches at each position (except at the 5′-most base which must remain a G for efficient expression from the U6 promoter). Data presented as in 5A.

[0053] FIG. 6A: Absolute frequencies of on- and off-target indel mutations induced by RGNs targeted to three different endogenous human gene sites as measured by deep sequencing. Indel frequencies are shown for the three target sites from cells in which targeted RGNs with a full-length gRNA, a tru-gRNA, or a control gRNA lacking a complementarity region were expressed. Absolute counts of indel mutations used to make these graphs can be found in Table 3B.

[0054] FIG. 6B: Fold-improvements in off-target site specificities of three tru-RGNs. Values shown represent the ratio of on/off-target activities of tru-RGNs to on/off-target activities of standard RGNs for the off-target sites shown, calculated using the data from (A) and Table 3B. For the sites marked with an asterisk (*), no indels were observed with the tru-RGN and therefore the values shown represent conservative statistical estimates for the fold-improvements in specificities for these off-target sites (see Results and Experimental Procedures).

[0055] FIG. 6C, top: Comparison of the on-target and an off-target site identified by T7EI assay for the tru-RGN targeted to VEGFA site 1 (more were identified by deep sequencing). Note that the full-length gRNA is mismatched to the two nucleotides at the 5′ end of the target site and that these are the two nucleotides not present in the tru-gRNA target site. Mismatches in the off-target site relative to the on-target are highlighted in bold underlined text. Mismatches between the gRNAs and the off-target site are shown with X's. Figure discloses SEQ ID NOS 2757 and 2758, respectively, in order of appearance.

[0056] FIG. 6C, bottom: Indel mutation frequencies induced in the off-target site by RGNs bearing full-length or truncated gRNAs. Indel mutation frequencies were determined by T7EI assay. Note that the off-target site in this figure is one that we had examined previously for indel mutations induced by the standard RGN targeted to VEGFA site 1 and designated as site OT1-30 in that earlier study (Example 1 and Fu et al., Nat Biotechnol. 31(9):822-6 (2013)). It is likely that we did not identify off-target mutations at this site in our previous experiments because the frequency of indel mutations appears to be at the reliable detection limit of the T7EI assay (2-5%). Figure discloses SEQ ID NOS 2759 and 2760, respectively, in order of appearance.

[0057] FIGS. 7A-D: DNA sequences of indel mutations induced by RGNs using tru-gRNAs or matched full-length gRNAs targeted to VEGFA sites 1 and 3. Sequences depicted as in FIG. 3C. FIGS. 7A-D disclose SEQ ID NOS 2761-2888, respectively, in order of appearance.

[0058] FIG. 7E. Indel mutation frequencies induced by tru-gRNAs bearing a mismatched 5′ G nucleotide. Indel mutation frequencies in human U2OS.EGFP cells induced by Cas9 directed by tru-gRNAs bearing 17, 18 or 20 nt complementarity regions for VEGFA sites 1 and 3 and EMX1 site 1 are shown. Three of these gRNAs contain a mismatched 5′ G (indicated by positions marked in bold text). Bars indicate results from experiments using full-length gRNA (20 nt), tru-gRNA (17 or 18 nt), and tru-gRNA with a mismatched 5′ G nucleotide (17 or 18 nt with boldface Tat 5′ end). (Note that no activity was detectable for the mismatched tru-gRNA to EMX1 site 1.) Figure discloses SEQ ID NOS 2890-2898, respectively, in order of appearance.

[0059] FIGS. 8A-C: Sequences of off-target indel mutations induced by RGNs in human U2OS.EGFP cells. Wild-type genomic off-target sites recognized by RGNs (including the PAM sequence) are highlighted in grey and numbered as in Table 1 and Table B. Note that the complementary strand is shown for some sites. Deleted bases are shown as dashes on a grey background. Inserted bases are italicized and highlighted in grey. FIGS. 8A-C disclose SEQ ID NOS 2899-2974, respectively, in order of appearance.

[0060] FIGS. 9A-C: Sequences of off-target indel mutations induced by RGNs in human HEK293 cells. Wild-type genomic off-target sites recognized by RGNs (including the PAM sequence) are highlighted in grey and numbered as in Table 1 and Table B. Note that the complementary strand is shown for some sites. Deleted bases are shown as dashes on a grey background. Inserted bases are italicized and highlighted in grey. *Yielded a large number of single bp indels. FIGS. 9A-C disclose SEQ ID NOS 2975-3037 and 2889, respectively, in order of appearance.

### DETAILED DESCRIPTION

[0061] CRISPR RNA-guided nucleases (RGNs) have rapidly emerged as a facile and efficient platform for genome editing. Although Marraffini and colleagues (Jiang et al., Nat Biotechnol 31, 233-239 (2013)) recently performed a systematic investigation of Cas9 RGN specificity in bacteria, the specificities of RGNs in human cells have not been extensively defined. Understanding the scope of RGN-mediated off-target effects in human and other eukaryotic cells will be critically essential if these nucleases are to be used widely for research and therapeutic applications. The present inventors have used a human cell-based reporter assay to characterize off-target cleavage of Cas9-based RGNs. Single and double mismatches were tolerated to varying degrees depending on their position along the guide RNA (gRNA)-DNA interface. Off-target alterations induced by four out of six RGNs targeted to endogenous loci in human cells were readily detected by examination of partially mismatched sites. The off-target sites identified harbor up to five mismatches and many are mutagenized with frequencies comparable to (or higher than) those observed at the intended on-target site. Thus RGNs are highly active even with imperfectly matched RNA-DNA interfaces in human cells, a finding that might confound their use in research and therapeutic applications.

[0062] The results described herein reveal that predicting the specificity profile of any given RGN is neither simple nor straightforward. The EGFP reporter assay experiments show that single and double mismatches can have variable effects on RGN activity in human cells that do not strictly depend upon their position(s) within the target site. For example, consistent with previously published reports, alterations in the 3′ half of the sgRNA/DNA interface generally have greater effects than those in the 5′ half (Jiang et al., Nat Biotechnol 31, 233-239 (2013); Cong et al., Science 339, 819-823 (2013); Jinek et al., Science 337, 816-821 (2012)); however, single and double mutations in the 3′ end sometimes also appear to be well tolerated whereas double mutations in the 5′ end can greatly diminish activities. In addition, the magnitude of these effects for mismatches at any given position(s) appears to be site-dependent. Comprehensive profiling of a large series of RGNs with testing of all possible nucleotide substitutions (beyond the Watson-Crick transversions used in our EGFP reporter experiments) may help provide additional insights into the range of potential off-targets. In this regard, the recently described bacterial cell-based method of Marraffini and colleagues (Jiang et al., Nat Biotechnol 31, 233-239 (2013)) or the in vitro, combinatorial library-based cleavage site-selection methodologies previously applied to ZFNs by Liu and colleagues (Pattanayak et al., Nat Methods 8, 765-770 (2011)) might be useful for generating larger sets of RGN specificity profiles.

[0063] Despite these challenges in comprehensively predicting RGN specificities, it was possible to identify bona fide off-targets of RGNs by examining a subset of genomic sites that differed from the on-target site by one to five mismatches. Notably, under conditions of these experiments, the frequencies of RGN-induced mutations at many of these off-target sites were similar to (or higher than) those observed at the intended on-target site, enabling the detection of mutations at these sites using the T7EI assay (which, as performed in our laboratory, has a reliable detection limit of ˜2 to 5% mutation frequency). Because these mutation rates were very high, it was possible to avoid using deep sequencing methods previously required to detect much lower frequency ZFN- and TALEN-induced off-target alterations (Pattanayak et al., Nat Methods 8, 765-770 (2011); Perez et al., Nat Biotechnol 26, 808-816 (2008); Gabriel et al., Nat Biotechnol 29, 816-823 (2011); Hockemeyer et al., Nat Biotechnol 29, 731-734 (2011)). Analysis of RGN off-target mutagenesis in human cells also confirmed the difficulties of predicting RGN specificities—not all single and double mismatched off-target sites show evidence of mutation whereas some sites with as many as five mismatches can also show alterations. Furthermore, the bona fide off-target sites identified do not exhibit any obvious bias toward transition or transversion differences relative to the intended target sequence (Table E; grey highlighted rows).

[0064] Although off-target sites were seen for a number of RGNs, identification of these sites was neither comprehensive nor genome-wide in scale. For the six RGNs studied, only a very small subset of the much larger total number of potential off-target sequences in the human genome (sites that differ by three to six nucleotides from the intended target site; compare Tables E and C) was examined. Although examining such large numbers of loci for off-target mutations by T7EI assay is neither a practical nor a cost-effective strategy, the use of high-throughput sequencing in future studies might enable the interrogation of larger numbers of candidate off-target sites and provide a more sensitive method for detecting bona fide off-target mutations. For example, such an approach might enable the unveiling of additional off-target sites for the two RGNs for which we failed to uncover any off-target mutations. In addition, an improved understanding both of RGN specificities and of any epigenomic factors (e.g., DNA methylation and chromatin status) that may influence RGN activities in cells might also reduce the number of potential sites that need to be examined and thereby make genome-wide assessments of RGN off-targets more practical and affordable.

[0065] As described herein, a number of strategies can be used to minimize the frequencies of genomic off-target mutations. For example, the specific choice of RGN target site can be optimized; given that off-target sites that differ at up to five positions from the intended target site can be efficiently mutated by RGNs, choosing target sites with minimal numbers of off-target sites as judged by mismatch counting seems unlikely to be effective; thousands of potential off-target sites that differ by four or five positions within the 20 bp RNA:DNA complementarity region will typically exist for any given RGN targeted to a sequence in the human genome (see, for example, Table C). It is also possible that the nucleotide content of the gRNA complementarity region might influence the range of potential off-target effects. For example, high GC-content has been shown to stabilize RNA:DNA hybrids (Sugimoto et al., Biochemistry 34, 11211-11216 (1995)) and therefore might also be expected to make gRNA/genomic DNA hybridization more stable and more tolerant to mismatches. Additional experiments with larger numbers of gRNAs will be needed to assess if and how these two parameters (numbers of mismatched sites in the genome and stability of the RNA:DNA hybrid) influence the genome-wide specificities of RGNs. However, it is important to note that even if such predictive parameters can be defined, the effect of implementing such guidelines would be to further restrict the targeting range of RGNs.

[0066] One potential general strategy for reducing RGN-induced off-target effects might be to reduce the concentrations of gRNA and Cas9 nuclease expressed in the cell. This idea was tested using the RGNs for VEGFA target sites 2 and 3 in U2OS.EGFP cells; transfecting less sgRNA- and Cas9-expressing plasmid decreased the mutation rate at the on-target site but did not appreciably change the relative rates of off-target mutations (Tables 2A and 2B). Consistent with this, high-level off-target mutagenesis rates were also observed in two other human cell types (HEK293 and K562 cells) even though the absolute rates of on-target mutagenesis are lower than in U2OS.EGFP cells. Thus, reducing expression levels of gRNA and Cas9 in cells is not likely to provide a solution for reducing off-target effects. Furthermore, these results also suggest that the high rates of off-target mutagenesis observed in human cells are not caused by overexpression of gRNA and/or Cas9.

TABLE 2A
Indel mutation frequencies at on- and off-target genomic sites
induced by different amounts of Cas9- and single gRNA-expressing
plasmids for the RGN targeted to VEGFA Target Site 2

| | | | 250 ng gRNA/ | 12.5 ng gRNA/ |
|---|---|---|---|---|
| | | | 750 ng Cas9 | 50 ng Cas9 |
| | | SEQ | Mean indel | Mean indel |
| | | ID | frequency | frequency |
| Site | Sequence | NO: | (%) ±SEM | (%) ±SEM |
| T2 | GACCCCCTCCACCCCGCCTCCGG | 12 | 50.2 ± 4.9 | 25.4 ± 4.8 |
| (On-target) | | | | |
| OT2-1 | GACCCCCCCCACCCCGCCCCCGG | 13 | 14.4 ± 3.4 | 4.2 ± 0.2 |
| OT2-2 | GGGCCCCTCCACCCCGCCTCTGG | 14 | 20.0 ± 6.2 | 9.8 ± 1.1 |
| OT2-6 | CTACCCCTCCACCCCGCCTCCGG | 15 | 8.2 ± 1.4 | 6.0 ± 0.5 |
| OT2-9 | GCCCCCACCCACCCCGCCTCTGG | 16 | 50.7 ± 5.6 | 16.4 ± 2.1 |
| OT2-15 | TACCCCCCACACCCCGCCTCTGG | 17 | 9.7 ± 4.5 | 2.1 ± 0.0 |
| OT2-17 | ACACCCCCCCACCCCGCCTCAGG | 18 | 14.0 ± 2.8 | 7.1 ± 0.0 |
| OT2-19 | ATTCCCCCCCACCCCGCCTCAGG | 19 | 17.0 ± 3.3 | 9.2 ± 0.4 |
| OT2-20 | CCCCACCCCCACCCCGCCTCAGG | 20 | 6.1 ± 1.3 | N.D. |
| OT2-23 | CGCCCTCCCCACCCCGCCTCCGG | 21 | 44.4 ± 6.7 | 35.1 ± 1.8 |
| OT2-24 | CTCCCCACCCACCCCGCCTCAGG | 22 | 62.8 ± 5.0 | 44.1 ± 4.5 |
| OT2-29 | TGCCCCTCCCACCCCGCCTCTGG | 23 | 13.8 ± 5.2 | 5.0 ± 0.2 |
| OT2-34 | AGGCCCCCACACCCCGCCTCAGG | 24 | 2.8 ± 1.5 | N.D. |

Amounts of gRNA- and Cas9-expressing plasmids transfected into U2OS.EGFP cells for these assays are shown at the top of each column. (Note that data for 250 ng gRNA/750 ng Cas9 are the same as those presented in Table 1.) Mean indel frequencies were determined using the T7EI assay from replicate samples as described in Methods.
OT = Off-target sites, numbered as in Table 1 and Table B. Mismatches from the on-target site (within the 20 bp region to which the gRNA hybridizes) are highlighted as bold, underlined text.
N.D. = none detected

TABLE 2B
Indel mutation frequencies at on- and off-target genomic sites
induced by different amounts of Cas9- and single gRNA-expressing
plasmids for the RGN targeted to VEGFA Target Site 3

| | | | 250 ng gRNA/ | 12.5 ng gRNA/ |
|---|---|---|---|---|
| | | | 750 ng Cas9 | 250 ng Cas9 |
| | | SEQ | Mean indel | Mean indel |
| | | ID | frequency | frequency |
| Site | Sequence | NO: | (%) ± SEM | (%) ± SEM |
| T3 | GGTGAGTGAGTGTGTGCGTGTGG | 25 | 49.4 ± 3.8 | 33.0 ± 3.7 |
| (On-target) | | | | |
| OT3-1 | GGTGAGTGAGTGTGTGTGTGAGG | 26 | 7.4 ± 3.4 | N.D. |
| OT3-2 | AGTGAGTGAGTGTGTGTGTGGGG | 27 | 24.3 ± 9.2 | 9.8 ± 4.2 |
| OT3-4 | GCTGAGTGAGTGTATGCGTGTGG | 28 | 20.9 ± 11.8 | 4.2 ± 1.2 |
| OT3-9 | GGTGAGTGAGTGCGTGCGGGTGG | 29 | 3.2 ± 0.3 | N.D. |
| OT3-17 | GTTGAGTGAATGTGTGCGTGAGG | 30 | 2.9 ± 0.2 | N.D. |
| OT3-18 | TGTGGGTGAGTGTGTGCGTGAGG | 31 | 13.4 ± 4.2 | 4.9 ± 0.0 |
| OT3-20 | AGAGAGTGAGTGTGTGCATGAGG | 32 | 16.7 ± 3.5 | 7.9 ± 2.4 |

Amounts of gRNA- and Cas9-expressing plasmids transfected into U2OS.EGFP cells for these assays are shown at the top of each column. (Note that data for 250 ng gRNA/750 ng Cas9 are the same as those presented in Table 1.) Mean indel frequencies were determined using the T7EI assay from replicate samples as described in Methods.
OT = Off-target sites, numbered as in Table 1 and Table B.
N.D. = none detected

[0067] The finding that significant off-target mutagenesis can be induced by RGNs in three different human cell types has important implications for broader use of this genome-editing platform. For research applications, the potentially confounding effects of high frequency off-target mutations will need to be considered, particularly for experiments involving either cultured cells or organisms with slow generation times for which the outcrossing of undesired alterations would be challenging. One way to control for such effects might be to utilize multiple RGNs targeted to different DNA sequences to induce the same genomic alteration because off-target effects are not random but instead related to the targeted site. However, for therapeutic applications, these findings clearly indicate that the specificities of RGNs will need to be carefully defined and/or improved if these nucleases are to be used safely in the longer term for treatment of human diseases.

### Methods for Improving Specificity

[0068] As shown herein, CRISPR-Cas RNA-guided nucleases based on the S. pyogenes Cas9 protein can have significant off-target mutagenic effects that are comparable to or higher than the intended on-target activity (Example 1). Such off-target effects can be problematic for research and in particular for potential therapeutic applications. Therefore, methods for improving the specificity of CRISPR-Cas RNA guided nucleases (RGNs) are needed.

[0069] As described in Example 1, Cas9 RGNs can induce high-frequency indel mutations at off-target sites in human cells (see also Cradick et al., 2013; Fu et al., 2013; Hsu et al., 2013; Pattanayak et al., 2013). These undesired alterations can occur at genomic sequences that differ by as many as five mismatches from the intended on-target site (see Example 1). In addition, although mismatches at the 5′ end of the gRNA complementarity region are generally better tolerated than those at the 3′ end, these associations are not absolute and show site-to-site-dependence (see Example 1 and Fu et al., 2013; Hsu et al., 2013; Pattanayak et al., 2013). As a result, computational methods that rely on the number and/or positions of mismatches currently have limited predictive value for identifying bona fide off-target sites. Therefore, methods for reducing the frequencies of off-target mutations remain an important priority if RNA-guided nucleases are to be used for research and therapeutic applications.

[0070] Truncated Guide RNAs (Tru-gRNAs) Achieve Greater Specificity

[0071] Guide RNAs generally speaking come in two different systems: System 1, which uses separate crRNA and tracrRNAs that function together to guide cleavage by Cas9, and System 2, which uses a chimeric crRNA-tracrRNA hybrid that combines the two separate guide RNAs in a single system (referred to as a single guide RNA or sgRNA, see also Jinek et al., Science 2012; 337:816-821). The tracrRNA can be variably truncated and a range of lengths has been shown to function in both the separate system (system 1) and the chimeric gRNA system (system 2). For example, in some embodiments, tracrRNA may be truncated from its 3′ end by at least 1, 2, 3, 4, 5, 6, 7, 8, 9, 10, 15, 20, 25, 30, 35 or 40 nts. In some embodiments, the tracrRNA molecule may be truncated from its 5′ end by at least 1, 2, 3, 4, 5, 6, 7, 8, 9, 10, 15, 25, 30, 35 or 40 nts. Alternatively, the tracrRNA molecule may be truncated from both the 5′ and 3′ end, e.g., by at least 1, 2, 3, 4, 5, 6, 7, 8, 9, 10, 15 or 20 nts on the 5′ end and at least 1, 2, 3, 4, 5, 6, 7, 8, 9, 10, 15, 20, 25, 30, 35 or 40 nts on the 3′ end. See, e.g., Jinek et al., Science 2012; 337:816-821; Mali et al., Science. 2013 Feb. 15; 339(6121):823-6; Cong et al., Science. 2013 Feb. 15; 339(6121):819-23; and Hwang and Fu et al., Nat Biotechnol. 2013 March; 31(3):227-9; Jinek et al., Elife 2, e00471 (2013)). For System 2, generally the longer length chimeric gRNAs have shown greater on-target activity but the relative specificities of the various length gRNAs currently remain undefined and therefore it may be desirable in certain instances to use shorter gRNAs. In some embodiments, the gRNAs are complementary to a region that is within about 100-800 bp upstream of the transcription start site, e.g., is within about 500 bp upstream of the transcription start site, includes the transcription start site, or within about 100-800 bp, e.g., within about 500 bp, downstream of the transcription start site. In some embodiments, vectors (e.g., plasmids) encoding more than one gRNA are used, e.g., plasmids encoding, 2, 3, 4, 5, or more gRNAs directed to different sites in the same region of the target gene.

[0072] The present application describes a strategy for improving RGN specificity based on the seemingly counterintuitive idea of shortening, rather than lengthening, the gRNA complementarity region. These shorter gRNAs can induce various types of Cas9-mediated on-target genome editing events with efficiencies comparable to (or, in some cases, higher than) full-length gRNAs at multiple sites in a single integrated EGFP reporter gene and in endogenous human genes. In addition, RGNs using these shortened gRNAs exhibit increased sensitivity to small numbers of mismatches at the gRNA-target DNA interface. Most importantly, use of shortened gRNAs substantially reduces the rates of genomic off-target effects in human cells, yielding improvements of specificity as high as 5000-fold or more at these sites. Thus, this shortened gRNA strategy provides a highly effective approach for reducing off-target effects without compromising on-target activity and without the need for expression of a second, potentially mutagenic gRNA. This approach can be implemented on its own or in conjunction with other strategies such as the paired nickase method to reduce the off-target effects of RGNs in human cells.

[0073] Thus, one method to enhance specificity of CRISPR/Cas nucleases shortens the length of the guide RNA (gRNA) species used to direct nuclease specificity. Cas9 nuclease can be guided to specific 17-18 nt genomic targets bearing an additional proximal protospacer adjacent motif (PAM), e.g., of sequence NGG, using a guide RNA, e.g., a single gRNA or a crRNA (paired with a tracrRNA), bearing 17 or 18 nts at its 5′ end that are complementary to the complementary strand of the genomic DNA target site (FIG. 1).

[0074] Although one might expect that increasing the length of the gRNA complementarity region would improve specificity, the present inventors (Hwang et al., PLoS One. 2013 Jul. 9; 8(7):e68708) and others (Ran et al., Cell. 2013 Sep. 12; 154(6):1380-9) have previously observed that lengthening the target site complementarity region at the 5′ end of the gRNA actually makes it function less efficiently at the on-target site.

[0075] By contrast, experiments in Example 1 showed that gRNAs bearing multiple mismatches within a standard length 5′ complementarity targeting region could still induce robust Cas9-mediated cleavage of their target sites. Thus, it was possible that truncated gRNAs lacking these 5′-end nucleotides might show activities comparable to their full-length counterparts (FIG. 2A). It was further speculated that these 5′ nucleotides might normally compensate for mismatches at other positions along the gRNA-target DNA interface and therefore predicted that shorter gRNAs might be more sensitive to mismatches and thus induce lower levels of off-target mutations (FIG. 2A).

[0076] Decreasing the length of the DNA sequence targeted might also decrease the stability of the gRNA:DNA hybrid, making it less tolerant of mismatches and thereby making the targeting more specific. That is, truncating the gRNA sequence to recognize a shorter DNA target might actually result in a RNA-guided nuclease that is less tolerant to even single nucleotide mismatches and is therefore more specific and has fewer unintended off-target effects.

[0077] This strategy for shortening the gRNA complementarity region could potentially be used with RNA guided proteins other than S. pyogenes Cas9 including other Cas proteins from bacteria or archaea as well as Cas9 variants that nick a single strand of DNA or have no-nuclease activity such as a dCas9 bearing catalytic inactivating mutations in one or both nuclease domains. This strategy can be applied to systems that utilize a single gRNA as well as those that use dual gRNAs (e.g., the crRNA and tracrRNA found in naturally occurring systems).

[0078] Thus, described herein is a single guide RNA comprising a crRNA fused to a normally trans-encoded tracrRNA, e.g., a single Cas9 guide RNA as described in Mali et al., Science 2013 Feb. 15; 339(6121):823-6, but with a sequence at the 5′ end that is complementary to fewer than 20 nucleotides (nts), e.g., 19, 18, or 17 nts, preferably 17 or 18 nts, of the complementary strand to a target sequence immediately 5′ of a protospacer adjacent motif (PAM), e.g., NGG, NAG, or NNGG. In some embodiments, the shortened Cas9 guide RNA consists of the sequence:

(SEQ ID NO: 2404)
(X₁₇₋₁₈ or X₁₇₋₁₉)GUUUUAGAGCUA;
(SEQ ID NO: 2407)
(X₁₇₋₁₈ or X₁₇₋₁₉) GUUUUAGAGCUAUGCUGUUUUG;
or
(SEQ ID NO: 2408)
(X₁₇₋₁₈ or X₁₇₋₁₉)GUUUUAGAGCUAUGCU;
(SEQ ID NO: 1)
(X₁₇₋₁₈ or X₁₇₋₁₉)
GUUUUAGAGCUAGAAAUAGCAAGUUAAAAUAAGGCUAGUCCG(X_{N});
(SEQ ID NO: 2)
(X₁₇₋₁₈ or X₁₇₋₁₉)
GUUUUAGAGCUAUGCUGAAAAGCAUAGCAAGUUAAAAUAAGGCU
AGUCCGUUAUC(X_{N});
(SEQ ID NO: 3)
(X₁₇₋₁₈ or X₁₇₋₁₉)
GUUUUAGAGCUAUGCUGUUUUGGAAACAAAACAGCAUAGCAAGU
UAAAAUAAGGCUAGUCCGUUAUC(X_{N});
(SEQ ID NO: 4)
(X₁₇₋₁₈ or X₁₇₋₁₉)
GUUUUAGAGCUAGAAAUAGCAAGUUAAAAUAAGGCUAGUCCGUU
AUCAACUUGAAAAAGUGGCACCGAGUCGGUGC(X_{N}),
(SEQ ID NO: 5)
(X₁₇₋₁₈ or X₁₇₋₁₉)
GUUUAAGAGCUAGAAAUAGCAAGUUUAAAUAAGGCUAGUCCGUU
AUCAACUUGAAAAAGUGGCACCGAGUCGGUGC;
(SEQ ID NO: 6)
(X₁₇₋₁₈ or X₁₇₋₁₉)
GUUUUAGAGCUAUGCUGGAAACAGCAUAGCAAGUUUAAAUAAGG
CUAGUCCGUUAUCAACUUGAAAAAGUGGCACCGAGUCGGUGC;
or
(SEQ ID NO: 7)
(X₁₇₋₁₈ or X₁₇₋₁₉)
GUUUAAGAGCUAUGCUGGAAACAGCAUAGCAAGUUUAAAUAAGG
CUAGUCCGUUAUCAACUUGAAAAAGUGGCACCGAGUCGGUGC;

wherein X₁₇₋₁₈ or X₁₇₋₁₉ is the nucleotide sequence complementary to 17-18 or 17-19 consecutive nucleotides of the target sequence, respectively. Also described herein are DNAs encoding the shortened Cas9 guide RNAs that have been described previously in the literature (Jinek et al., Science. 337(6096):816-21 (2012) and Jinek et al., Elife. 2:e00471 (2013)).

[0079] The guide RNAs can include X_{N} which can be any sequence, wherein N (in the RNA) can be 0-200, e.g., 0-100, 0-50, or 0-20, that does not interfere with the binding of the ribonucleic acid to Cas9.

[0080] In some embodiments, the guide RNA includes one or more Adenine (A) or Uracil (U) nucleotides on the 3′ end. In some embodiments the RNA includes one or more U, e.g., 1 to 8 or more Us (e.g., U, UU, UUU, UUUU, UUUUU, UUUUUU, UUUUUUU, UUUUUUUU) at the 3′ end of the molecule, as a result of the optional presence of one or more Ts used as a termination signal to terminate RNA PolIII transcription.

[0081] Modified RNA oligonucleotides such as locked nucleic acids (LNAs) have been demonstrated to increase the specificity of RNA-DNA hybridization by locking the modified oligonucleotides in a more favorable (stable) conformation. For example, 2′-O-methyl RNA is a modified base where there is an additional covalent linkage between the 2′ oxygen and 4′ carbon which when incorporated into oligonucleotides can improve overall thermal stability and selectivity (formula I).

[chemical structure]

[0082] Thus in some embodiments, the tru-gRNAs disclosed herein may comprise one or more modified RNA oligonucleotides. For example, the truncated guide RNAs molecules described herein can have one, some or all of the 17-18 or 17-19 nts 5′ region of the guideRNA complementary to the target sequence are modified, e.g., locked (2′-O-4′-C methylene bridge), 5′-methylcytidine, 2′-O-methyl-pseudouridine, or in which the ribose phosphate backbone has been replaced by a polyamide chain (peptide nucleic acid), e.g., a synthetic ribonucleic acid.

[0083] In other embodiments, one, some or all of the nucleotides of the tru-gRNA sequence may be modified, e.g., locked (2′-O-4′-C methylene bridge), 5′-methylcytidine, 2′-O-methyl-pseudouridine, or in which the ribose phosphate backbone has been replaced by a polyamide chain (peptide nucleic acid), e.g., a synthetic ribonucleic acid.

[0084] In a cellular context, complexes of Cas9 with these synthetic gRNAs could be used to improve the genome-wide specificity of the CRISPR/Cas9 nuclease system.

[0085] Exemplary modified or synthetic tru-gRNAs may comprise, or consist of, the following sequences:

(SEQ ID NO: 2404)
(X₁₇₋₁₈ or X₁₇₋₁₉)GUUUUAGAGCUA(X_{N});
(SEQ ID NO: 2407)
(X₁₇₋₁₈ or X₁₇₋₁₉) GUUUUAGAGCUAUGCUGUUUUG (X_{N});
(SEQ ID NO: 2408)
(X₁₇₋₁₈ or X₁₇₋₁₉)GUUUUAGAGCUAUGCU(X_{N});
(SEQ ID NO: 1)
(X₁₇₋₁₈ or X₁₇₋₁₉)
GUUUUAGAGCUAGAAAUAGCAAGUUAAAAUAAGGCUAGUCCG(X_{N});
(SEQ ID NO: 2)
(X₁₇₋₁₈ or X₁₇₋₁₉)
GUUUUAGAGCUAUGCUGAAAAGCAUAGCAAGUUAAAAUAAGGCU
AGUCCGUUAUC(X_{N});
(SEQ ID NO: 3)
(X₁₇₋₁₈ or X₁₇₋₁₉)
GUUUUAGAGCUAUGCUGUUUUGGAAACAAAACAGCAUAGCAAGU
UAAAAUAAGGCUAGUCCGUUAUC(X_{N});
(SEQ ID NO: 4)
(X₁₇₋₁₈)
GUUUUAGAGCUAGAAAUAGCAAGUUAAAAUAAGGCUAGUCCGUU
AUCAACUUGAAAAAGUGGCACCGAGUCGGUGC(X_{N}),
(SEQ ID NO: 5)
(X₁₇₋₁₈ or X₁₇₋₁₉)
GUUUAAGAGCUAGAAAUAGCAAGUUUAAAUAAGGCUAGUCCGUU
AUCAACUUGAAAAAGUGGCACCGAGUCGGUGC;
(SEQ ID NO: 6)
(X₁₇₋₁₈ or X₁₇₋₁₉)
GUUUUAGAGCUAUGCUGGAAACAGCAUAGCAAGUUUAAAUAAGG
CUAGUCCGUUAUCAACUUGAAAAAGUGGCACCGAGUCGGUGC;
or
(SEQ ID NO: 7)
(X₁₇₋₁₈ or X₁₇₋₁₉)
GUUUAAGAGCUAUGCUGGAAACAGCAUAGCAAGUUUAAAUAAGG
CUAGUCCGUUAUCAACUUGAAAAAGUGGCACCGAGUCGGUGC;

wherein X₁₇₋₁₈ or X₁₇₋₁₉ is a sequence complementary to 17-18 or 17-19 nts of a target sequence, respectively, preferably a target sequence immediately 5′ of a protospacer adjacent motif (PAM), e.g., NGG, NAG, or NNGG, and further wherein one or more of the nucleotides are locked, e.g., one or more of the nucleotides within the sequence X₁₇₋₁₈ or X₁₇₋₁₉, one or more of the nucleotides within the sequence X_{N}, or one or more of the nucleotides within any sequence of the tru-gRNA. X_{N} is any sequence, wherein N (in the RNA) can be 0-200, e.g., 0-100, 0-50, or 0-20, that does not interfere with the binding of the ribonucleic acid to Cas9. In some embodiments the RNA includes one or more U, e.g., 1 to 8 or more Us (e.g., U, UU, UUU, UUUU, UUUUU, UUUUUU, UUUUUUU, UUUUUUUU) at the 3′ end of the molecule, as a result of the optional presence of one or more Ts used as a termination signal to terminate RNA PolIII transcription.

[0086] Although some of the examples described herein utilize a single gRNA, the methods can also be used with dual gRNAs (e.g., the crRNA and tracrRNA found in naturally occurring systems). In this case, a single tracrRNA would be used in conjunction with multiple different crRNAs expressed using the present system, e.g., the following: (X₁₇₋₁₈ or X₁₇₋₁₉)GUUUUAGAGCUA (SEQ ID NO:2404); (X₁₇₋₁₈ or X₁₇₋₁₉) GUUUUAGAGCUAUGCUGUUUUG (SEQ ID NO:2407); or (X₁₇₋₁₈ or X₁₇₋₁₉)GUUUUAGAGCUAUGCU (SEQ ID NO:2408); and a tracrRNA sequence. In this case, the crRNA is used as the guide RNA in the methods and molecules described herein, and the tracrRNA can be expressed from the same or a different DNA molecule. In some embodiments, the methods include contacting the cell with a tracrRNA comprising or consisting of the sequence GGAACCAUUCAAAACAGCAUAGCAAGUUAAAAUAAGGCUAGUCCGUUA UCAACUUGAAAAAGUGGCACCGAGUCGGUGC (SEQ ID NO:8) or an active portion thereof (an active portion is one that retains the ability to form complexes with Cas9 or dCas9). In some embodiments, the tracrRNA molecule may be truncated from its 3′ end by at least 1, 2, 3, 4, 5, 6, 7, 8, 9, 10, 15, 20, 25, 30, 35 or 40 nts. In another embodiment, the tracrRNA molecule may be truncated from its 5′ end by at least 1, 2, 3, 4, 5, 6, 7, 8, 9, 10, 15, 20, 25, 30, 35 or 40 nts. Alternatively, the tracrRNA molecule may be truncated from both the 5′ and 3′ end, e.g., by at least 1, 2, 3, 4, 5, 6, 7, 8, 9, 10, 15 or 20 nts on the 5′ end and at least 1, 2, 3, 4, 5, 6, 7, 8, 9, 15, 20, 25, 30, 35 or 40 nts on the 3′ end. Exemplary tracrRNA sequences in addition to SEQ ID NO:8 include the following:
[0087] UAGCAAGUUAAAAUAAGGCUAGUCCGUUAUCAACUUGAAAAAGUGGCA CCGAGUCGGUGC (SEQ ID NO:2405) or an active portion thereof;
[0088] AGCAUAGCAAGUUAAAAUAAGGCUAGUCCGUUAUCAACUUGAAAAAGU GGCACCGAGUCGGUGC (SEQ ID NO:2407) or an active portion thereof;
[0089] CAAAACAGCAUAGCAAGUUAAAAUAAGGCUAGUCCGUUAUCAACUUGA AAAAGUGGCACCGAGUCGGUGC (SEQ ID NO:2409) or an active portion thereof;
[0090] UAGCAAGUUAAAAUAAGGCUAGUCCGUUAUCAACUUGAAAAAGUG (SEQ ID NO:2410) or an active portion thereof;
[0091] UAGCAAGUUAAAAUAAGGCUAGUCCGUUAUCA (SEQ ID NO:2411) or an active portion thereof; or UAGCAAGUUAAAAUAAGGCUAGUCCG (SEQ ID NO:2412) or an active portion thereof.

[0092] In some embodiments wherein (X₁₇₋₁₈ or X₁₇₋₁₉)GUUUUAGAGCUAUGCUGUUUUG (SEQ ID NO:2407) is used as a crRNA, the following tracrRNA is used:
[0093] GGAACCAUUCAAAACAGCAUAGCAAGUUAAAAUAAGGCUAGUCCGUUA UCAACUUGAAAAAGUGGCACCGAGUCGGUGC (SEQ ID NO:8) or an active portion thereof. In some embodiments wherein (X₁₇₋₁₈ or X₁₇₋₁₉)GUUUUAGAGCUA (SEQ ID NO:2404) is used as a crRNA, the following tracrRNA is used:
[0094] UAGCAAGUUAAAAUAAGGCUAGUCCGUUAUCAACUUGAAAAAGUGGCA CCGAGUCGGUGC (SEQ ID NO:2405) or an active portion thereof. In some embodiments wherein (X₁₇₋₁₈ or X₁₇₋₁₉) GUUUUAGAGCUAUGCU (SEQ ID NO:2408) is used as a crRNA, the following tracrRNA is used:
[0095] AGCAUAGCAAGUUAAAAUAAGGCUAGUCCGUUAUCAACUUGAAAAAGU GGCACCGAGUCGGUGC (SEQ ID NO:2406) or an active portion thereof.

[0096] In addition, in a system that uses separate crRNA and tracrRNA, one or both can be synthetic and include one or more modified (e.g., locked) nucleotides or deoxyribonucleotides.

[0097] In some embodiments, the single guide RNAs and/or crRNAs and/or tracrRNAs can include one or more Adenine (A) or Uracil (U) nucleotides on the 3′ end.

[0098] Existing Cas9-based RGNs use gRNA-DNA heteroduplex formation to guide targeting to genomic sites of interest. However, RNA-DNA heteroduplexes can form a more promiscuous range of structures than their DNA-DNA counterparts. In effect, DNA-DNA duplexes are more sensitive to mismatches, suggesting that a DNA-guided nuclease may not bind as readily to off-target sequences, making them comparatively more specific than RNA-guided nucleases. Thus, the truncated guide RNAs described herein can be hybrids, i.e., wherein one or more deoxyribonucleotides, e.g., a short DNA oligonucleotide, replaces all or part of the gRNA, e.g., all or part of the complementarity region of a gRNA. This DNA-based molecule could replace either all or part of the gRNA in a single gRNA system or alternatively might replace all of part of the crRNA in a dual crRNA/tracrRNA system. Such a system that incorporates DNA into the complementarity region should more reliably target the intended genomic DNA sequences due to the general intolerance of DNA-DNA duplexes to mismatching compared to RNA-DNA duplexes. Methods for making such duplexes are known in the art, See, e.g., Barker et al., BMC Genomics. 2005 Apr. 22; 6:57; and Sugimoto et al., Biochemistry. 2000 Sep. 19; 39(37):11270-81.

[0099] Exemplary modified or synthetic tru-gRNAs may comprise, or consist of, the following sequences:

(SEQ ID NO: 1)
(X₁₇₋₁₈ or X₁₇₋₁₉)
GUUUUAGAGCUAGAAAUAGCAAGUUAAAAUAAGGCUAGUCCG(X_{N});
(SEQ ID NO: 2)
(X₁₇₋₁₈ or X₁₇₋₁₉)
GUUUUAGAGCUAUGCUGAAAAGCAUAGCAAGUUAAAAUAAGGCU
AGUCCGUUAUC(X_{N});
(SEQ ID NO: 3)
(X₁₇₋₁₈ or X₁₇₋₁₉)
GUUUUAGAGCUAUGCUGUUUUGGAAACAAAACAGCAUAGCAAGU
UAAAAUAAGGCUAGUCCGUUAUC(X_{N});
(SEQ ID NO: 4)
(X₁₇₋₁₈ or X₁₇₋₁₉)
GUUUUAGAGCUAGAAAUAGCAAGUUAAAAUAAGGCUAGUCCGUU
AUCAACUUGAAAAAGUGGCACCGAGUCGGUGC(X_{N}),
(SEQ ID NO: 5)
(X₁₇₋₁₈ or X₁₇₋₁₉)
GUUUAAGAGCUAGAAAUAGCAAGUUUAAAUAAGGCUAGUCCGUU
AUCAACUUGAAAAAGUGGCACCGAGUCGGUGC;
(SEQ ID NO: 6)
(X₁₇₋₁₈ or X₁₇₋₁₉)
GUUUUAGAGCUAUGCUGGAAACAGCAUAGCAAGUUUAAAUAAGG
CUAGUCCGUUAUCAACUUGAAAAAGUGGCACCGAGUCGGUGC;
or
(SEQ ID NO: 7)
(X₁₇₋₁₈ or X₁₇₋₁₉)
GUUUAAGAGCUAUGCUGGAAACAGCAUAGCAAGUUUAAAUAAGG
CUAGUCCGUUAUCAACUUGAAAAAGUGGCACCGAGUCGGUGC;

[0100] wherein X₁₇₋₁₈ or X₁₇₋₁₉ is a sequence complementary to 17-18 or 17-19 nts of a target sequence, respectively, preferably a target sequence immediately 5′ of a protospacer adjacent motif (PAM), e.g., NGG, NAG, or NNGG, and further wherein one or more of the nucleotides are deoxyribonucleotides, e.g., one or more of the nucleotides within the sequence X₁₇₋₁₈ or X₁₇₋₁₉, one or more of the nucleotides within the sequence X_{N}, or one or more of the nucleotides within any sequence of the tru-gRNA. X_{N} is any sequence, wherein N (in the RNA) can be 0-200, e.g., 0-100, 0-50, or 0-20, that does not interfere with the binding of the ribonucleic acid to Cas9. In some embodiments the RNA includes one or more U, e.g., 1 to 8 or more Us (e.g., U, UU, UUU, UUUU, UUUUU, UUUUUU, UUUUUUU, UUUUUUUU) at the 3′ end of the molecule, as a result of the optional presence of one or more Ts used as a termination signal to terminate RNA PolIII transcription.

[0101] In addition, in a system that uses separate crRNA and tracrRNA, one or both can be synthetic and include one or more deoxyribonucleotides.

[0102] In some embodiments, the single guide RNAs or crRNAs or tracrRNAs includes one or more Adenine (A) or Uracil (U) nucleotides on the 3′ end.

[0103] In some embodiments, the gRNA is targeted to a site that is at least three or more mismatches different from any sequence in the rest of the genome in order to minimize off-target effects.

[0104] The methods described can include expressing in a cell, or contacting the cell with, a shortened Cas9 gRNA (tru-gRNA) as described herein (optionally a modified or DNA/RNA hybrid tru-gRNA), plus a nuclease that can be guided by the shortened Cas9 gRNAs, e.g., a Cas9 nuclease, e.g., as described in Mali et al., a Cas9 nickase as described in Jinek et al., 2012; or a dCas9-heterofunctional domain fusion (dCas9-HFD).

[0105] Cas9

[0106] A number of bacteria express Cas9 protein variants. The Cas9 from Streptococcus pyogenes is presently the most commonly used; some of the other Cas9 proteins have high levels of sequence identity with the S. pyogenes Cas9 and use the same guide RNAs. Others are more diverse, use different gRNAs, and recognize different PAM sequences as well (the 2-5 nucleotide sequence specified by the protein which is adjacent to the sequence specified by the RNA). Chylinski et al. classified Cas9 proteins from a large group of bacteria (RNA Biology 10:5, 1-12; 2013), and a large number of Cas9 proteins are listed in supplementary FIG. 1 and supplementary table 1 thereof, which are incorporated by reference herein. Additional Cas9 proteins are described in Esvelt et al., Nat Methods. 2013 November; 10(11):1116-21 and Fonfara et al., “Phylogeny of Cas9 determines functional exchangeability of dual-RNA and Cas9 among orthologous type II CRISPR-Cas systems.” Nucleic Acids Res. 2013 Nov. 22. [Epub ahead of print] doi:10.1093/nar/gkt1074.

[0107] Cas9 molecules of a variety of species can be used in the methods and compositions described herein. While the S. pyogenes and S. thermophilus Cas9 molecules are the subject of much of the disclosure herein, Cas9 molecules of, derived from, or based on the Cas9 proteins of other species listed herein can be used as well. In other words, while the much of the description herein uses S. pyogenes and S. thermophilus Cas9 molecules, Cas9 molecules from the other species can replace them. Such species include those set forth in the following table, which was created based on supplementary FIG. 1 of Chylinski et al., 2013.

Alternative Cas9 proteins

| GenBank Acc No. | Bacterium |
|---|---|
| 303229466 | Veillonella atypica ACS-134-V-Col7a |
| 34762592 | Fusobacterium nucleatum subsp. vincentii |
| 374307738 | Filifactor alocis ATCC 35896 |
| 320528778 | Solobacterium moorei F0204 |
| 291520705 | Coprococcus catus GD-7 |
| 42525843 | Treponema denticola ATCC 35405 |
| 304438954 | Peptoniphilus duerdenii ATCC BAA-1640 |
| 224543312 | Catenibacterium mitsuokai DSM 15897 |
| 24379809 | Streptococcus mutans UA159 |
| 15675041 | Streptococcus pyogenes SF370 |
| 16801805 | Listeria innocua Clip11262 |
| 116628213 | Streptococcus thermophilus LMD-9 |
| 323463801 | Staphylococcus pseudintermedius ED99 |
| 352684361 | Acidaminococcus intestini RyC-MR95 |
| 302336020 | Olsenella uli DSM 7084 |
| 366983953 | Oenococcus kitaharae DSM 17330 |
| 310286728 | Bifidobacterium bifidum S17 |
| 258509199 | Lactobacillus rhamnosus GG |
| 300361537 | Lactobacillus gasseri JV-V03 |
| 169823755 | Finegoldia magna ATCC 29328 |
| 47458868 | Mycoplasma mobile 163K |
| 284931710 | Mycoplasma gallisepticum str. F |
| 363542550 | Mycoplasma ovipneumoniae SC01 |
| 384393286 | Mycoplasma canis PG 14 |
| 71894592 | Mycoplasma synoviae 53 |
| 238924075 | Eubacterium rectale ATCC 33656 |
| 116627542 | Streptococcus thermophilus LMD-9 |
| 315149830 | Enterococcus faecalis TX0012 |
| 315659848 | Staphylococcus lugdunensis M23590 |
| 160915782 | Eubacterium dolichum DSM 3991 |
| 336393381 | Lactobacillus coryniformis subsp. torquens |
| 310780384 | Ilyobacter polytropus DSM 2926 |
| 325677756 | Ruminococcus albus 8 |
| 187736489 | Akkermansia muciniphila ATCC BAA-835 |
| 117929158 | Acidothermus cellulolyticus 11B |
| 189440764 | Bifidobacterium longum DJO10A |
| 283456135 | Bifidobacterium dentium Bd1 |
| 38232678 | Corynebacterium diphtheriae NCTC 13129 |
| 187250660 | Elusimicrobium minutum Pei191 |
| 319957206 | Nitratifractor salsuginis DSM 16511 |
| 325972003 | Sphaerochaeta globus str. Buddy |
| 261414553 | Fibrobacter succinogenes subsp. succinogenes |
| 60683389 | Bacteroides fragilis NCTC 9343 |
| 256819408 | Capnocytophaga ochracea DSM 7271 |
| 90425961 | Rhodopseudomonas palustris BisB18 |
| 373501184 | Prevotella micans F0438 |
| 294674019 | Prevotella ruminicola 23 |
| 365959402 | Flavobacterium columnare ATCC 49512 |
| 312879015 | Aminomonas paucivorans DSM 12260 |
| 83591793 | Rhodospirillum rubrum ATCC 11170 |
| 294086111 | Candidatus Puniceispirillum marinum IMCC1322 |
| 121608211 | Verminephrobacter eiseniae EF01-2 |
| 344171927 | Ralstonia syzygii R24 |
| 159042956 | Dinoroseobacter shibae DFL 12 |
| 288957741 | Azospirillum sp- B510 |
| 92109262 | Nitrobacter hamburgensis X14 |
| 148255343 | Bradyrhizobium sp- BTAil |
| 34557790 | Wolinella succinogenes DSM 1740 |
| 218563121 | Campylobacter jejuni subsp. jejuni |
| 291276265 | Helicobacter mustelae 12198 |
| 229113166 | Bacillus cereus Rock1-15 |
| 222109285 | Acidovorax ebreus TPSY |
| 189485225 | uncultured Termite group 1 |
| 182624245 | Clostridium perfringens D str. |
| 220930482 | Clostridium cellulolyticum H10 |
| 154250555 | Parvibaculum lavamentivorans DS-1 |
| 257413184 | Roseburia intestinalis L1-82 |
| 218767588 | Neisseria meningitidis Z2491 |
| 15602992 | Pasteurella multocida subsp. multocida |
| 319941583 | Sutterella wadsworthensis 3 1 |
| 254447899 | gamma proteobacterium HTCC5015 |
| 54296138 | Legionella pneumophila str. Paris |
| 331001027 | Parasutterella excrementihominis YIT 11859 |
| 34557932 | Wolinella succinogenes DSM 1740 |
| 118497352 | Francisella novicida U112 |

[0108] The constructs and methods described herein can include the use of any of those Cas9 proteins, and their corresponding guide RNAs or other guide RNAs that are compatible. The Cas9 from Streptococcus thermophilus LMD-9 CRISPR1 system has also been shown to function in human cells in Cong et al (Science 339, 819 (2013)). Cas9 orthologs from N. meningitides are described in Hou et al., Proc Natl Acad Sci USA. 2013 Sep. 24; 110(39):15644-9 and Esvelt et al., Nat Methods. 2013 November; 10(11):1116-21. Additionally, Jinek et al. showed in vitro that Cas9 orthologs from S. thermophilus and L. innocua, (but not from N. meningitidis or C. jejuni, which likely use a different guide RNA), can be guided by a dual S. pyogenes gRNA to cleave target plasmid DNA, albeit with slightly decreased efficiency.

[0109] In some embodiments, the present system utilizes the Cas9 protein from S. pyogenes, either as encoded in bacteria or codon-optimized for expression in mammalian cells, containing mutations at D10, E762, H983, or D986 and H840 or N863, e.g., D10A/D10N and H840A/H840N/H840Y, to render the nuclease portion of the protein catalytically inactive; substitutions at these positions could be alanine (as they are in Nishimasu al., Cell 156, 935-949 (2014)) or they could be other residues, e.g., glutamine, asparagine, tyrosine, serine, or aspartate, e.g., E762Q, H983N, H983Y, D986N, N863D, N863S, or N863H (FIG. 1C). The sequence of the catalytically inactive S. pyogenes Cas9 that can be used in the methods and compositions described herein is as follows; the exemplary mutations of D10A and H840A are in bold and underlined.

```
(SEQ ID NO: 33)
                10 20 30 40 50 60
MDKKYSIGLA IGTNSVGWAV ITDEYKVPSK KFKVLGNTDR HSIKKNLIGA LLFDSGETAE
                70 80 90 100 110 120
ATRLKRTARR RYTRRKNRIC YLQEIFSNEM AKVDDSFFHR LEESFLVEED KKHERHPIFG
              130 140 150 160 170 180
NIVDEVAYHE KYPTIYHLRK KLVDSTDKAD LRLIYLALAH MIKFRGHFLI EGDLNPDNSD
              190 200 210 220 230 240
VDKLFIQLVQ TYNQLFEENP INASGVDAKA ILSARLSKSR RLENLIAQLP GEKKNGLFGN
              250 260 270 280 290 300
LIALSLGLTP NFKSNFDLAE DAKLQLSKDT YDDDLDNLLA QIGDQYADLF LAAKNLSDAI
              310 320 330 340 350 360
LLSDILRVNT EITKAPLSAS MIKRYDEHHQ DLTLLKALVR QQLPEKYKEI FFDQSKNGYA
              370 380 390 400 410 420
GYIDGGASQE EFYKFIKPIL EKMDGTEELL VKLNREDLLR KQRTFDNGSI PHQIHLGELH
              430 440 450 460 470 480
AILRRQEDFY PFLKDNREKI EKILTFRIPY YVGPLARGNS RFAWMTRKSE ETITPWNFEE
              490 500 510 520 530 540
VVDKGASAQS FIERMTNFDK NLPNEKVLPK HSLLYEYFTV YNELTKVKYV TEGMRKPAFL
              550 560 570 580 590 600
SGEQKKAIVD LLFKTNRKVT VKQLKEDYFK KIECFDSVEI SGVEDRFNAS LGTYHDLLKI
              610 620 630 640 650 660
IKDKDFLDNE ENEDILEDIV LTLTLFEDRE MIEERLKTYA HLFDDKVMKQ LKRRRYTGWG
              670 680 690 700 710 720
RLSRKLINGI RDKQSGKTIL DFLKSDGFAN RNFMQLIHDD SLTFKEDIQK AQVSGQGDSL
              730 740 750 760 770 780
HEHIANLAGS PAIKKGILQT VKVVDELVKV MGRHKPENIV IEMARENQTT QKGQKNSRER
              790 800 810 820 830 840
MKRIEEGIKE LGSQILKEHP VENTQLQNEK LYLYYLQNGR DMYVDQELDI NRLSDYDVDA
              850 860 870 880 890 900
IVPQSFLKDD SIDNKVLTRS DKNRGKSDNV PSEEVVKKMK NYWRQLLNAK LITQRKFDNL
              910 920 930 940 950 960
TKAERGGLSE LDKAGFIKRQ LVETRQITKH VAQILDSRMN TKYDENDKLI REVKVITLKS
              970 980 990 1000 1010 1020
KLVSDFRKDF QFYKVREINN YHHAHDAYLN AVVGTALIKK YPKLESEFVY GDYKVYDVRK
            1030 1040 1050 1060 1070 1080
MIAKSEQEIG KATAKYFFYS NIMNFFKTEI TLANGEIRKR PLIETNGETG EIVWDKGRDF
            1090 1100 1110 1120 1130 1140
ATVRKVLSMP QVNIVKKTEV QTGGFSKESI LPKRNSDKLI ARKKDWDPKK YGGFDSPTVA
            1150 1160 1170 1180 1190 1200
YSVLVVAKVE KGKSKKLKSV KELLGITIME RSSFEKNPID FLEAKGYKEV KKDLIIKLPK
            1210 1220 1230 1240 1250 1260
YSLFELENGR KRMLASAGEL QKGNELALPS KYVNFLYLAS HYEKLKGSPE DNEQKQLFVE
            1270 1280 1290 1300 1310 1320
QHKHYLDEII EQISEFSKRV ILADANLDKV LSAYNKHRDK PIREQAENII HLFTLTNLGA
            1330 1340 1350 1360
PAAFKYFDTT IDRKRYTSTK EVLDATLIHQ SITGLYETRI DLSQLGGD
```

[0110] In some embodiments, the Cas9 nuclease used herein is at least about 50% identical to the sequence of S. pyogenes Cas9, i.e., at least 50% identical to SEQ ID NO:33. In some embodiments, the nucleotide sequences are about 50%, 55%, 60%, 65%, 70%, 75%, 80%, 85%, 90%, 95%, 99% or 100% identical to SEQ ID NO:33. In some embodiments, any differences from SEQ ID NO:33 are in non-conserved regions, as identified by sequence alignment of sequences set forth in Chylinski et al., RNA Biology 10:5, 1-12; 2013 (e.g., in supplementary FIG. 1 and supplementary table 1 thereof); Esvelt et al., Nat Methods. 2013 November; 10(11):1116-21 and Fonfara et al., Nucl. Acids Res. (2014) 42 (4): 2577-2590. [Epub ahead of print 2013 Nov. 22] doi:10.1093/nar/gkt1074.

[0111] To determine the percent identity of two sequences, the sequences are aligned for optimal comparison purposes (gaps are introduced in one or both of a first and a second amino acid or nucleic acid sequence as required for optimal alignment, and non-homologous sequences can be disregarded for comparison purposes). The length of a reference sequence aligned for comparison purposes is at least 50% (in some embodiments, about 50%, 55%, 60%, 65%, 70%, 75%, 85%, 90%, 95%, or 100% of the length of the reference sequence is aligned). The nucleotides or residues at corresponding positions are then compared. When a position in the first sequence is occupied by the same nucleotide or residue as the corresponding position in the second sequence, then the molecules are identical at that position. The percent identity between the two sequences is a function of the number of identical positions shared by the sequences, taking into account the number of gaps, and the length of each gap, which need to be introduced for optimal alignment of the two sequences.

[0112] The comparison of sequences and determination of percent identity between two sequences can be accomplished using a mathematical algorithm. For purposes of the present application, the percent identity between two amino acid sequences is determined using the Needleman and Wunsch ((1970) J. Mol. Biol. 48:444-453) algorithm which has been incorporated into the GAP program in the GCG software package, using a Blossum 62 scoring matrix with a gap penalty of 12, a gap extend penalty of 4, and a frameshift gap penalty of 5.

[0113] Cas9-HFD

[0114] Cas9-HFD are described in a U.S. Provisional patent application U.S. Ser. No. 61/799,647, Filed on Mar. 15, 2013, U.S. Ser. No. 61/838,148, filed on Jun. 21, 2013, and PCT International Application No. PCT/US14/27335, all of which are incorporated herein by reference in its entirety.

[0115] The Cas9-HFD are created by fusing a heterologous functional domain (e.g., a transcriptional activation domain, e.g., from VP64 or NF-κB p65), to the N-terminus or C-terminus of a catalytically inactive Cas9 protein (dCas9). In the present case, as noted above, the dCas9 can be from any species but is preferably from S. pyogenes, In some embodiments, the Cas9 contains mutations in the D10 and H840 residues, e.g., D10N/D10A and H840A/H840N/H840Y, to render the nuclease portion of the protein catalytically inactive, e.g., as shown in SEQ ID NO:33 above.

[0116] The transcriptional activation domains can be fused on the N or C terminus of the Cas9. In addition, although the present description exemplifies transcriptional activation domains, other heterologous functional domains (e.g., transcriptional repressors (e.g., KRAB, ERD, SID, and others, e.g., amino acids 473-530 of the ets2 repressor factor (ERF) repressor domain (ERD), amino acids 1-97 of the KRAB domain of KOX1, or amino acids 1-36 of the Mad mSIN3 interaction domain (SID); see Beerli et al., PNAS USA 95:14628-14633 (1998)) or silencers such as Heterochromatin Protein 1 (HP1, also known as swi6), e.g., HP1α or HP1β; proteins or peptides that could recruit long non-coding RNAs (lncRNAs) fused to a fixed RNA binding sequence such as those bound by the MS2 coat protein, endoribonuclease Csy4, or the lambda N protein; enzymes that modify the methylation state of DNA (e.g., DNA methyltransferase (DNMT) or TET proteins); or enzymes that modify histone subunits (e.g., histone acetyltransferases (HAT), histone deacetylases (HDAC), histone methyltransferases (e.g., for methylation of lysine or arginine residues) or histone demethylases (e.g., for demethylation of lysine or arginine residues)) as are known in the art can also be used. A number of sequences for such domains are known in the art, e.g., a domain that catalyzes hydroxylation of methylated cytosines in DNA. Exemplary proteins include the Ten-Eleven-Translocation (TET)1-3 family, enzymes that converts 5-methylcytosine (5-mC) to 5-hydroxymethylcytosine (5-hmC) in DNA.

[0117] Sequences for human TET1-3 are known in the art and are shown in the following table:

| | GenBank Accession Nos. | |
|---|---|---|
| Gene | Amino Acid | Nucleic Acid |
| TET1 | NP_085128.2 | NM_030625.2 |
| TET2* | NP_001120680.1 (var 1) | NM_001127208.2 |
| | NP_060098.3 (var 2) | NM_017628.4 |
| TET3 | NP_659430.1 | NM_144993.1 |

*Variant (1) represents the longer transcript and encodes the longer isoform (a).
Variant (2) differs in the 5′ UTR and in the 3′ UTR and coding sequence compared to variant 1.
The resulting isoform (b) is shorter and has a distinct C-terminus compared to isoform a.

[0118] In some embodiments, all or part of the full-length sequence of the catalytic domain can be included, e.g., a catalytic module comprising the cysteine-rich extension and the 2OGFeDO domain encoded by 7 highly conserved exons, e.g., the Tet1 catalytic domain comprising amino acids 1580-2052, Tet2 comprising amino acids 1290-1905 and Tet3 comprising amino acids 966-1678. See, e.g., FIG. 1 of Iyer et al., Cell Cycle. 2009 Jun. 1; 8(11):1698-710. Epub 2009 Jun. 27, for an alignment illustrating the key catalytic residues in all three Tet proteins, and the supplementary materials thereof (available at ftp site ftp.ncbi.nih.gov/pub/aravind/DONS/supplementary_material_DONS.html) for full length sequences (see, e.g., seq 2c); in some embodiments, the sequence includes amino acids 1418-2136 of Tet1 or the corresponding region in Tet2/3.

[0119] Other catalytic modules can be from the proteins identified in Iyer et al., 2009.

[0120] In some embodiments, the heterologous functional domain is a biological tether, and comprises all or part of (e.g., DNA binding domain from) the MS2 coat protein, endoribonuclease Csy4, or the lambda N protein. These proteins can be used to recruit RNA molecules containing a specific stem-loop structure to a locale specified by the dCas9 gRNA targeting sequences. For example, a dCas9 fused to MS2 coat protein, endoribonuclease Csy4, or lambda N can be used to recruit a long non-coding RNA (lncRNA) such as XIST or HOTAIR; see, e.g., Keryer-Bibens et al., Biol. Cell 100:125-138 (2008), that is linked to the Csy4, MS2 or lambda N binding sequence. Alternatively, the Csy4, MS2 or lambda N protein binding sequence can be linked to another protein, e.g., as described in Keryer-Bibens et al., supra, and the protein can be targeted to the dCas9 binding site using the methods and compositions described herein. In some embodiments, the Csy4 is catalytically inactive.

[0121] In some embodiments, the fusion proteins include a linker between the dCas9 and the heterologous functional domains. Linkers that can be used in these fusion proteins (or between fusion proteins in a concatenated structure) can include any sequence that does not interfere with the function of the fusion proteins. In preferred embodiments, the linkers are short, e.g., 2-20 amino acids, and are typically flexible (i.e., comprising amino acids with a high degree of freedom such as glycine, alanine, and serine). In some embodiments, the linker comprises one or more units consisting of GGGS (SEQ ID NO:34) or GGGGS (SEQ ID NO:35), e.g., two, three, four, or more repeats of the GGGS (SEQ ID NO:34) or GGGGS (SEQ ID NO:35) unit. Other linker sequences can also be used.

[0122] Expression Systems

[0123] In order to use the guide RNAs described, it may be desirable to express them from a nucleic acid that encodes them. This can be performed in a variety of ways. For example, the nucleic acid encoding the guide RNA can be cloned into an intermediate vector for transformation into prokaryotic or eukaryotic cells for replication and/or expression. Intermediate vectors are typically prokaryote vectors, e.g., plasmids, or shuttle vectors, or insect vectors, for storage or manipulation of the nucleic acid encoding the guide RNA for production of the guide RNA. The nucleic acid encoding the guide RNA can also be cloned into an expression vector, for administration to a plant cell, animal cell, preferably a mammalian cell or a human cell, fungal cell, bacterial cell, or protozoan cell.

[0124] To obtain expression, a sequence encoding a guide RNA is typically subcloned into an expression vector that contains a promoter to direct transcription. Suitable bacterial and eukaryotic promoters are well known in the art and described, e.g., in Sambrook et al., Molecular Cloning, A Laboratory Manual (3d ed. 2001); Kriegler, Gene Transfer and Expression: A Laboratory Manual (1990); and Current Protocols in Molecular Biology (Ausubel et al., eds., 2010). Bacterial expression systems for expressing the engineered protein are available in, e.g., E. coli, Bacillus sp., and Salmonella (Palva et al., 1983, Gene 22:229-235). Kits for such expression systems are commercially available. Eukaryotic expression systems for mammalian cells, yeast, and insect cells are well known in the art and are also commercially available.

[0125] The promoter used to direct expression of a nucleic acid depends on the particular application. For example, a strong constitutive promoter is typically used for expression and purification of fusion proteins. In contrast, when the guide RNA is to be administered in vivo for gene regulation, either a constitutive or an inducible promoter can be used, depending on the particular use of the guide RNA. In addition, a preferred promoter for administration of the guide RNA can be a weak promoter, such as HSV TK or a promoter having similar activity. The promoter can also include elements that are responsive to transactivation, e.g., hypoxia response elements, Gal4 response elements, lac repressor response element, and small molecule control systems such as tetracycline-regulated systems and the RU-486 system (see, e.g., Gossen & Bujard, 1992, Proc. Natl. Acad. Sci. USA, 89:5547; Oligino et al., 1998, Gene Ther., 5:491-496; Wang et al., 1997, Gene Ther., 4:432-441; Neering et al., 1996, Blood, 88:1147-55; and Rendahl et al., 1998, Nat. Biotechnol., 16:757-761).

[0126] In addition to the promoter, the expression vector typically contains a transcription unit or expression cassette that contains all the additional elements required for the expression of the nucleic acid in host cells, either prokaryotic or eukaryotic. A typical expression cassette thus contains a promoter operably linked, e.g., to the nucleic acid sequence encoding the gRNA, and any signals required, e.g., for efficient polyadenylation of the transcript, transcriptional termination, ribosome binding sites, or translation termination. Additional elements of the cassette may include, e.g., enhancers, and heterologous spliced intronic signals.

[0127] The particular expression vector used to transport the genetic information into the cell is selected with regard to the intended use of the gRNA, e.g., expression in plants, animals, bacteria, fungus, protozoa, etc. Standard bacterial expression vectors include plasmids such as pBR322 based plasmids, pSKF, pET23D, and commercially available tag-fusion expression systems such as GST and LacZ.

[0128] Expression vectors containing regulatory elements from eukaryotic viruses are often used in eukaryotic expression vectors, e.g., SV40 vectors, papilloma virus vectors, and vectors derived from Epstein-Barr virus. Other exemplary eukaryotic vectors include pMSQ pAV009/A+, pMT010/A+, pMAMneo-5, baculovirus pDSVE, and any other vector allowing expression of proteins under the direction of the SV40 early promoter, SV40 late promoter, metallothionein promoter, murine mammary tumor virus promoter, Rous sarcoma virus promoter, polyhedrin promoter, or other promoters shown effective for expression in eukaryotic cells.

[0129] The vectors for expressing the guide RNAs can include RNA Pol III promoters to drive expression of the guide RNAs, e.g., the H1, U6 or 7SK promoters. These human promoters allow for expression of gRNAs in mammalian cells following plasmid transfection. Alternatively, a T7 promoter may be used, e.g., for in vitro transcription, and the RNA can be transcribed in vitro and purified. Vectors suitable for the expression of short RNAs, e.g., siRNAs, shRNAs, or other small RNAs, can be used.

[0130] Some expression systems have markers for selection of stably transfected cell lines such as thymidine kinase, hygromycin B phosphotransferase, and dihydrofolate reductase. High yield expression systems are also suitable, such as using a baculovirus vector in insect cells, with the gRNA encoding sequence under the direction of the polyhedrin promoter or other strong baculovirus promoters.

[0131] The elements that are typically included in expression vectors also include a replicon that functions in E. coli, a gene encoding antibiotic resistance to permit selection of bacteria that harbor recombinant plasmids, and unique restriction sites in nonessential regions of the plasmid to allow insertion of recombinant sequences.

[0132] Standard transfection methods are used to produce bacterial, mammalian, yeast or insect cell lines that express large quantities of protein, which are then purified using standard techniques (see, e.g., Colley et al., 1989, J. Biol. Chem., 264:17619-22; Guide to Protein Purification, in Methods in Enzymology, vol. 182 (Deutscher, ed., 1990)). Transformation of eukaryotic and prokaryotic cells are performed according to standard techniques (see, e.g., Morrison, 1977, J. Bacteriol. 132:349-351; Clark-Curtiss & Curtiss, Methods in Enzymology 101:347-362 (Wu et al., eds, 1983).

[0133] Any of the known procedures for introducing foreign nucleotide sequences into host cells may be used. These include the use of calcium phosphate transfection, polybrene, protoplast fusion, electroporation, nucleofection, liposomes, microinjection, naked DNA, plasmid vectors, viral vectors, both episomal and integrative, and any of the other well-known methods for introducing cloned genomic DNA, cDNA, synthetic DNA or other foreign genetic material into a host cell (see, e.g., Sambrook et al., supra). It is only necessary that the particular genetic engineering procedure used be capable of successfully introducing at least one gene into the host cell capable of expressing the gRNA.

[0134] The present invention includes the vectors and cells comprising the vectors.

### EXAMPLES

[0135] The invention is further described in the following examples, which do not limit the scope of the invention described in the claims.

### Example 1. Assessing Specificity of RNA-Guided Endonucleases

[0136] CRISPR RNA-guided nucleases (RGNs) have rapidly emerged as a facile and efficient platform for genome editing. This example describes the use of a human cell-based reporter assay to characterize off-target cleavage of Cas9-based RGNs.

### Materials and Methods

[0137] The following materials and methods were used in Example 1.

[0138] Construction of Guide RNAs

[0139] DNA oligonucleotides (Table A) harboring variable 20 nt sequences for Cas9 targeting were annealed to generate short double-strand DNA fragments with 4 bp overhangs compatible with ligation into BsmBI-digested plasmid pMLM3636. Cloning of these annealed oligonucleotides generates plasmids encoding a chimeric +103 single-chain guide RNA with 20 variable 5′ nucleotides under expression of a U6 promoter (Hwang et al., Nat Biotechnol 31, 227-229 (2013); Mali et al., Science 339, 823-826 (2013)). pMLM3636 and the expression plasmid pJDS246 (encoding a codon optimized version of Cas9) used in this study are both available through the non-profit plasmid distribution service Addgene (addgene.org/crispr-cas).

TABLE A

| | |
|---|---|
| gRNA Target Sequence Position | Oligos for genterating gRNA expression plasmid |

EGFP Target Site 1

| 20 | 19 | 18 | 17 | 16 | 15 | 14 | 13 | 12 | 11 | 10 | 9 | 8 | 7 | 6 | 5 | 4 | 3 | 2 | 1 | oligonucleotide 1 (5′ to 3′) | # | oligonucleotide 2 (5′ to 3′) | # |
|---|---|---|---|---|---|---|---|---|---|---|---|---|---|---|---|---|---|---|---|---|---|---|---|
| G | G | G | C | A | C | G | G | G | C | A | G | C | T | T | G | C | C | G | G | ACACCGGGCACGGGCAGCTTGCCGGG | 36. | AAAACCCGGCAAGCTGCCCGTGCCCG | 230. |
| G | G | G | C | A | C | G | G | G | C | A | G | C | T | T | G | C | C | G | c | ACACCGGGCACGGGCAGCTTGCCGCG | 37. | AAAACGCGGCAAGCTGCCCGTGCCCG | 231. |
| G | G | G | C | A | C | G | G | G | C | A | G | C | T | T | G | C | C | c | G | ACACCGGGCACGGGCAGCTTGCCCGG | 38. | AAAACCGGGCAAGCTGCCCGTGCCCG | 232. |
| G | G | G | C | A | C | G | G | G | C | A | G | C | T | T | G | C | g | G | G | ACACCGGGCACGGGCAGCTTGCGGGG | 39. | AAAACCCCGCAAGCTGCCCGTGCCCG | 233. |
| G | G | G | C | A | C | G | G | G | C | A | G | C | T | T | G | g | C | G | G | ACACCGGGCACGGGCAGCTTGGCGGG | 40. | AAAACCCGCCAAGCTGCCCGTGCCCG | 234. |
| G | G | G | C | A | C | G | G | G | C | A | G | C | T | T | c | C | C | G | G | ACACCGGGCACGGGCAGCTTCCCGGG | 41. | AAAACCCGGGAAGCTGCCCGTGCCCG | 235. |
| G | G | G | C | A | C | G | G | G | C | A | G | C | T | a | G | C | C | G | G | ACACCGGGCACGGGCAGCTAGCCGGG | 42. | AAAACCCGGCTAGCTGCCCGTGCCCG | 236. |
| G | G | G | C | A | C | G | G | G | C | A | G | C | a | T | G | C | C | G | G | ACACCGGGCACGGGCAGCATGCCGGG | 43. | AAAACCCGGCATGCTGCCCGTGCCCG | 237. |
| G | G | G | C | A | C | G | G | G | C | A | G | g | T | T | G | C | C | G | G | ACACCGGGCACGGGCAGGTTGCCGGG | 44. | AAAACCCGGCAACCTGCCCGTGCCCG | 238. |
| G | G | G | C | A | C | G | G | G | C | A | c | C | T | T | G | C | C | G | G | ACACCGGGCACGGGCACCTTGCCGGG | 45. | AAAACCCGGCAAGGTGCCCGTGCCCG | 239. |
| G | G | G | C | A | C | G | G | G | C | t | G | C | T | T | G | C | C | G | G | ACACCGGGCACGGGCTGCTTGCCGGG | 46. | AAAACCCGGCAAGCAGCCCGTGCCCG | 240. |
| G | G | G | C | A | C | G | G | G | g | A | G | C | T | T | G | C | C | G | G | ACACCGGGCACGGGGAGCTTGCCGGG | 47. | AAAACCCGGCAAGCTCCCCGTGCCCG | 241. |
| G | G | G | C | A | C | G | G | c | C | A | G | C | T | T | G | C | C | G | G | ACACCGGGCACGGCCAGCTTGCCGGG | 48. | AAAACCCGGCAAGCTGGCCGTGCCCG | 242. |
| G | G | G | C | A | C | G | c | G | C | A | G | C | T | T | G | C | C | G | G | ACACCGGGCACGCGCAGCTTGCCGGG | 49. | AAAACCCGGCAAGCTGCGCGTGCCCG | 243. |
| G | G | G | C | A | C | c | G | G | C | A | G | C | T | T | G | C | C | G | G | ACACCGGGCACCGGCAGCTTGCCGGG | 50. | AAAACCCGGCAAGCTGCCGGTGCCCG | 244. |
| G | G | G | C | A | g | G | G | G | C | A | G | C | T | T | G | C | C | G | G | ACACCGGGCAGGGGCAGCTTGCCGGG | 51. | AAAACCCGGCAAGCTGCCCCTGCCCG | 245. |
| G | G | G | C | t | C | G | G | G | C | A | G | C | T | T | G | C | C | G | G | ACACCGGGCTCGGGCAGCTTGCCGGG | 52. | AAAACCCGGCAAGCTGCCCGAGCCCG | 246. |
| G | G | G | g | A | C | G | G | G | C | A | G | C | T | T | G | C | C | G | G | ACACCGGGGACGGGCAGCTTGCCGGG | 53. | AAAACCCGGCAAGCTGCCCGTCCCCG | 247. |
| G | G | c | C | A | C | G | G | G | C | A | G | C | T | T | G | C | C | G | G | ACACCGGCCACGGGCAGCTTGCCGGG | 54. | AAAACCCGGCAAGCTGCCCGTGGCCG | 248. |
| G | c | G | C | A | C | G | G | G | C | A | G | C | T | T | G | C | C | G | G | ACACCGCGCACGGGCAGCTTGCCGGG | 55. | AAAACCCGGCAAGCTGCCCGTGCGCG | 249. |
| G | G | G | C | A | C | G | G | G | C | A | G | C | T | T | G | C | C | G | G | ACACCGGGCACGGGCAGCTTGCCCCG | 56. | AAAACGGGGCAAGCTGCCCGTGCCCG | 250. |
| G | G | G | C | A | C | G | G | G | C | A | G | C | T | T | G | g | g | G | G | ACACCGGGCACGGGCAGCTTGGGGGG | 57. | AAAACCCCCCAAGCTGCCCGTGCCCG | 251. |
| G | G | G | C | A | C | G | G | G | C | A | G | C | T | a | c | C | C | G | G | ACACCGGGCACGGGCAGCTACCCGGG | 58. | AAAACCCGGGTAGCTGCCCGTGCCCG | 252. |
| G | G | G | C | A | C | G | G | G | C | A | G | g | a | T | G | C | C | G | G | ACACCGGGCACGGGCAGGATGCCGGG | 59. | AAAACCCGGCATCCTGCCCGTGCCCG | 253. |
| G | G | G | C | A | C | G | G | G | C | t | c | C | T | T | G | C | C | G | G | ACACCGGGCACGGGCTCCTTGCCGGG | 60. | AAAACCCGGCAAGGAGCCCGTGCCCG | 254. |
| G | G | G | C | A | C | G | G | c | g | A | G | C | T | T | G | C | C | G | G | ACACCGGGCACGGCGAGCTTGCCGGG | 61. | AAAACCCGGCAAGCTCGCCGTGCCCG | 255. |
| G | G | G | C | A | C | c | c | G | C | A | G | C | T | T | G | C | C | G | G | ACACCGGGCACCCGCAGCTTGCCGGG | 62. | AAAACCCGGCAAGCTGCGGGTGCCCG | 256. |
| G | G | G | C | t | g | G | G | G | C | A | G | C | T | T | G | C | C | G | G | ACACCGGGCTGGGGCAGCTTGCCGGG | 63. | AAAACCCGGCAAGCTGCCCCAGCCCG | 257. |
| G | G | c | g | A | C | G | G | G | C | A | G | C | T | T | G | C | C | G | G | ACACCGGCGACGGGCAGCTTGCCGGG | 64. | AAAACCCGGCAAGCTGCCCGTCGCCG | 258. |
| G | c | c | C | A | C | G | G | G | C | A | G | C | T | T | G | C | C | G | G | ACACCGCCCACGGGCAGCTTGCCGGG | 65. | AAAACCCGGCAAGCTGCCCGTGCGGG | 259. |
| G | c | C | g | A | C | G | G | G | C | A | G | C | T | T | G | C | C | G | G | ACACCGCCGACGGGCAGCTTGCCGGG | 66. | AAAACCCGGCAAGCTGCCCGTGCCCG | 260. |
| G | c | c | g | t | C | G | G | G | C | A | G | C | T | T | G | C | C | G | G | ACACCGCCGTCGGGCAGCTTGCCGGG | 67. | AAAACCCGGCAAGCTGCCCGTGCCCG | 261. |
| G | c | c | g | t | g | G | G | G | C | A | G | C | T | T | G | C | C | G | G | ACACCGCCGTGGGGCAGCTTGCCGGG | 68. | AAAACCCGGCAAGCTGCCCGTGCCCG | 262. |
| G | c | c | g | t | g | c | G | G | C | A | G | C | T | T | G | C | C | G | G | ACACCGCCGTGCGGCAGCTTGCCGGG | 69. | AAAACCCGGCAAGCTGCCCGTGCCCG | 263. |
| G | c | c | g | t | g | c | c | G | C | A | G | C | T | T | G | C | C | G | G | ACACCGCCGTGCCGCAGCTTGCCGGG | 70. | AAAACCCGGCAAGCTGCCCGTGCCCG | 264. |
| G | c | c | g | t | g | c | c | c | C | A | G | C | T | T | G | C | C | G | G | ACACCGCCGTGCCCCAGCTTGCCGGG | 71. | AAAACCCGGCAAGCTGCCCGTGCCCG | 265. |
| G | c | c | g | t | g | c | c | c | g | A | G | C | T | T | G | C | C | G | G | ACACCGCCGTGCCCGAGCTTGCCGGG | 72. | AAAACCCGGCAAGCTGCCCGTGCCCG | 266. |
| G | G | G | C | A | C | G | G | G | C | A | G | C | T | T | G | C | g | G | c | ACACCGGGCACGGGCAGCTTGCGGCG | 73. | AAAACGCCGCAAGCTGCCCGTGCCCG | 267. |
| G | G | G | C | A | C | G | G | G | C | A | G | C | T | T | c | C | g | G | G | ACACCGGGCACGGGCAGCTTCCGGGG | 74. | AAAACCCCGGAAGCTGCCCGTGCCCG | 268. |
| G | G | G | C | A | C | G | G | G | C | a | t | g | c | g | G | C | C | G | G | ACACCGGGCACGGGCAGCATGCGGGG | 75. | AAAACCCCGCATGCTGCCCGTGCCCG | 269. |
| G | G | G | C | A | C | G | G | G | C | A | G | C | T | T | G | C | C | G | G | ACACCGGGCACGGGCACCTTGCGGGG | 76. | AAAACCCCGCAAGGTGCCCGTGCCCG | 270. |
| G | G | G | C | A | C | G | G | G | g | A | G | C | T | T | G | C | g | G | G | ACACCGGGCACGGGGAGCTTGCGGGG | 77. | AAAACCCCGCAAGCTCCCCGTGCCCG | 271. |
| G | G | G | C | A | C | G | c | G | C | A | G | C | T | T | G | C | g | G | G | ACACCGGGCACGCGCAGCTTGCGGGG | 78. | AAAACCCCGCAAGCTGCGCGTGCCCG | 272. |
| G | G | G | C | A | g | G | G | G | C | A | G | C | T | T | G | C | g | G | G | ACACCGGGCAGGGGCAGCTTGCGGGG | 79. | AAAACCCCGCAAGCTGCCCCTGCCCG | 273. |
| G | G | G | g | A | C | G | G | G | C | A | G | C | T | T | G | C | C | G | G | ACACCGGGGACGGGCAGCTTGCGGGG | 80. | AAAACCCCGCAAGCTGCCCGTCCCCG | 274. |
| G | c | G | C | A | C | G | G | G | C | A | G | C | T | T | G | C | g | G | G | ACACCGCGCACGGGCAGCTTGCGGGG | 81. | AAAACCCCGCAAGCTGCCCGTGCGCG | 275. |
| G | G | G | C | A | C | G | G | G | g | A | G | C | T | T | G | C | C | G | c | ACACCGGGCACGGGGAGCTTGCCGCG | 82. | AAAACGCGGCAAGCTCCCCGTGCCCG | 276. |
| G | G | G | C | A | C | G | G | G | g | A | G | C | T | T | c | C | C | G | G | ACACCGGGCACGGGGAGCTTCCCGGG | 83. | AAAACCCGGGAAGCTCCCCGTGCCCG | 277. |
| G | G | G | C | A | C | G | G | G | g | A | G | C | a | T | G | C | C | G | G | ACACCGGGCACGGGGAGCATGCCGGG | 84. | AAAACCCGGCATGCTCCCCGTGCCCG | 278. |
| G | G | G | C | A | C | G | G | G | g | A | c | C | T | T | G | C | C | G | G | ACACCGGGCACGGGGACCTTGCCGGG | 85. | AAAACCCGGCAAGGTCCCCGTGCCCG | 279. |
| G | G | G | C | A | C | G | c | G | g | A | G | C | T | T | G | C | C | G | G | ACACCGGGCACGCGGAGCTTGCCGGG | 86. | AAAACCCGGCAAGCTCCGCGTGCCCG | 280. |
| G | G | G | C | A | g | G | G | G | g | A | G | C | T | T | G | C | C | G | G | ACACCGGGCAGGGGGAGCTTGCCGGG | 87. | AAAACCCGGCAAGCTCCCCCTGCCCG | 281. |
| G | G | G | g | A | C | G | G | G | g | A | G | C | T | T | G | C | C | G | G | ACACCGGGGACGGGGAGCTTGCCGGG | 88. | AAAACCCGGCAAGCTCCCCGTCCCCG | 282. |
| G | c | G | C | A | C | G | G | G | g | A | G | C | T | T | G | C | C | G | G | ACACCGCGCACGGGGAGCTTGCCGGG | 89. | AAAACCCGGCAAGCTCCCCGTGCGCG | 283. |
| G | c | G | C | A | C | G | G | G | C | A | G | C | T | T | G | C | C | G | c | ACACCGCGCACGGGCAGCTTGCCGCG | 90. | AAAACGCGGCAAGCTGCCCGTGCGCG | 284. |
| G | c | G | C | A | C | G | G | G | C | A | G | C | T | T | c | C | C | G | G | ACACCGCGCAGGGGGAGGTTCCCGGG | 91. | AAAACCCGGGAAGCTGCCCGTGCGCG | 285. |
| G | c | G | C | A | C | G | G | G | C | A | G | C | a | T | G | C | C | G | G | ACACCGCGCAGGGGGAGGATGCCGGG | 92. | AAAACCCGGCATGCTGCCCGTGCGCG | 286. |
| G | c | G | C | A | C | G | G | G | C | A | c | C | T | T | G | C | C | G | G | ACACCGCGCACGGGCACCTTGCCGGG | 93. | AAAACCCGGCAAGGTGCCCGTGCGCG | 287. |
| G | c | G | C | A | C | G | c | G | C | A | G | C | T | T | G | C | C | G | G | ACACCGCGCACGCGCAGCTTGCCGGG | 94. | AAAACCCGGCAAGCTGCGCGTGCGCG | 288. |
| G | c | G | C | A | g | G | G | G | C | A | G | C | T | T | G | C | C | G | G | ACACCGCGCAGGGGGAGGTTGCCGGG | 95. | AAAACCCGGCAAGCTGCCCCTGCGCG | 289. |
| G | c | G | g | A | C | G | G | G | C | A | G | C | T | T | G | C | C | G | G | ACACCGCGGACGGGCAGCTTGCCGGG | 96. | AAAACCCGGCAAGCTGCCCGTCCGCG | 290. |

EGFP TARGET SITE 2

| 20 | 19 | 18 | 17 | 16 | 15 | 14 | 13 | 12 | 11 | 10 | 9 | 8 | 7 | 6 | 5 | 4 | 3 | 2 | 1 | oligonucleotide 1 (5′ to 3′) | # | oligonucleotide 2 (5′ to 3′) | # |
|---|---|---|---|---|---|---|---|---|---|---|---|---|---|---|---|---|---|---|---|---|---|---|---|
| G | A | T | G | C | C | G | T | T | C | T | T | C | T | G | C | T | T | G | T | ACACCGATGCCGTTGTTGTGGTTGTG | 97. | AAAACACAAGCAGAAGAACGGCATCG | 291. |
| G | A | T | G | C | C | G | T | T | C | T | T | C | T | G | C | T | T | G | a | ACACCGATGCCGTTCTTCTGCTTGAG | 98. | AAAACACAAGCAGAAGAACGGCATCG | 292. |
| G | A | T | G | C | C | G | T | T | C | T | T | C | T | G | C | T | T | c | T | ACACCGATGCCGTTCTTCTGCTTCTG | 99. | AAAACACAAGCAGAAGAACGGCATCG | 293. |
| G | A | T | G | C | C | G | T | T | C | T | T | C | T | G | C | T | a | G | T | ACACCGATGCCGTTGTTGTGGTAGTG | 100 | AAAACACAAGCAGAAGAACGGCATCG | 294. |
| G | A | T | G | C | C | G | T | T | C | T | T | C | T | G | C | a | T | G | T | ACACCGATGCCGTTCTTCTGCATGTG | 101 | AAAACACAAGCAGAAGAACGGCATCG | 295. |
| G | A | T | G | C | C | G | T | T | C | T | T | C | T | G | g | T | T | G | T | ACACCGATGCCGTTCTTCTGGTTGTG | 102 | AAAACACAAGCAGAAGAACGGCATCG | 296. |
| G | A | T | G | C | C | G | T | T | C | T | T | C | T | c | C | T | T | G | T | ACACCGATGCCGTTCTTCTCCTTGTG | 103 | AAAACACAAGCAGAAGAACGGCATCG | 297. |
| G | A | T | G | C | C | G | T | T | C | T | T | C | a | G | C | T | T | G | T | ACACCGATGCCGTTGTTGAGGTTGTG | 104 | AAAACACAAGCAGAAGAACGGCATCG | 298. |
| G | A | T | G | C | C | G | T | T | C | T | T | g | T | G | C | T | T | G | T | ACACCGATGCCGTTCTTGTGCTTGTG | 105 | AAAACACAAGCAGAAGAACGGCATCG | 299. |
| G | A | T | G | C | C | G | T | T | C | T | a | C | T | G | C | T | T | G | T | ACACCGATGCCGTTGTAGTGGTTGTG | 106 | AAAACACAAGCAGAAGAACGGCATCG | 300. |
| G | A | T | G | C | C | G | T | T | C | a | T | C | T | G | C | T | T | G | T | ACACCGATGCCGTTCATCTGCTTGTG | 107 | AAAACACAAGCAGAAGAACGGCATCG | 301. |
| G | A | T | G | C | C | G | T | T | g | T | T | C | T | G | C | T | T | G | T | ACACCGATGCCGTTGTTCTGCTTGTG | 108 | AAAACACAAGCAGAAGAACGGCATCG | 302. |
| G | A | T | G | C | C | G | T | a | C | T | T | C | T | G | C | T | T | G | T | ACACCGATGCCGTACTTCTGCTTGTG | 109 | AAAACACAAGCAGAAGAACGGCATCG | 303. |
| G | A | T | G | C | C | G | a | T | C | T | T | C | T | G | C | T | T | G | T | ACACCGATGCCGATCTTCTGCTTGTG | 110 | AAAACACAAGCAGAAGAACGGCATCG | 304. |
| G | A | T | G | C | C | c | T | T | C | T | T | C | T | G | C | T | T | G | T | ACACCGATGCCCTTCTTCTGCTTGTG | 111 | AAAACACAAGCAGAAGAACGGCATCG | 305. |
| G | A | T | G | C | g | G | T | T | C | T | T | C | T | G | C | T | T | G | T | ACACCGATGCGGTTCTTCTGCTTGTG | 112 | AAAACACAAGCAGAAGAACGGCATCG | 306. |
| G | A | T | G | g | C | G | T | T | C | T | T | C | T | G | C | T | T | G | T | ACACCGATGGCGTTCTTCTGCTTGTG | 113 | AAAACACAAGCAGAAGAACGGCATCG | 307. |
| G | A | T | c | C | C | G | T | T | C | T | T | C | T | G | C | T | T | G | T | ACACCGATCCCGTTCTTGTGGTTGTG | 114 | AAAACACAAGCAGAAGAACGGCATCG | 308. |
| G | A | t | G | C | C | G | T | T | C | T | T | C | T | G | C | T | T | G | T | ACACCGAAGCCGTTCTTGTGGTTGTG | 115 | AAAACACAAGCAGAAGAACGGCATCG | 309. |
| G | a | T | G | C | C | G | T | T | C | T | T | C | T | G | C | T | T | G | T | ACACCGTTGCCGTTCTTGTGGTTGTG | 116 | AAAACACAAGCAGAAGAACGGCATCG | 310. |
| G | A | T | G | C | C | G | T | T | C | T | T | C | T | G | C | T | T | c | a | ACACCGATGCCGTTCTTCTGCTTCAG | 117 | AAAACTGAAGCAGAAGAACGGCATCG | 311. |
| G | A | T | G | C | C | G | T | T | C | T | T | C | T | G | C | a | a | G | T | ACACCGATGCCGTTCTTGTGGAAGTG | 118 | AAAACACAAGCAGAAGAACGGCATCG | 312. |
| G | A | T | G | C | C | G | T | T | C | T | T | C | T | c | g | T | T | G | T | ACACCGATGCCGTTCTTCTCGTTGTG | 119 | AAAACACAAGCAGAAGAACGGCATCG | 313. |
| G | A | T | G | C | C | G | T | T | C | T | T | g | a | G | C | T | T | G | T | ACACCGATGCCGTTCTTGAGGTTGTG | 120 | AAAACACAAGCTCAAGAACGGCATCG | 314. |
| G | A | T | G | C | C | G | T | T | C | a | a | C | T | G | C | T | T | G | T | ACACCGATGCCGTTCAAGTGGTTGTG | 121 | AAAACACAAGCAGAAGAACGGCATCG | 315. |
| G | A | T | G | C | C | G | T | a | g | T | T | C | T | G | C | T | T | G | T | ACACCGATGCCGTACTTGTGGTTGTG | 122 | AAAACACAAGCAGAAGAACGGCATCG | 316. |
| G | A | T | G | C | C | c | a | T | C | T | T | C | T | G | C | T | T | G | T | ACACCGATGCCCATCTTGTGGTTGTG | 123 | AAAACACAAGCAGAAGAACGGCATCG | 317. |
| G | A | T | G | g | g | G | T | T | C | T | T | C | T | G | C | T | T | G | T | ACACCGATGGGGTTCTTCTGCTTGTG | 124 | AAAACACAAGCAGAAGAACGGCATCG | 318. |
| G | A | a | c | C | C | G | T | T | C | T | T | C | T | G | C | T | T | G | T | ACACCGAACCCGTTCTTCTGCTTGTG | 125 | AAAACACAAGCAGAAGAACGGCATCG | 319. |
| G | t | a | G | C | C | G | T | T | C | T | T | C | T | G | C | T | T | G | T | ACACCGTAGCCCTTGTTGTGGTTGTG | 126 | AAAACACAAGCAGAAGAACGGCAAGG | 320. |
| G | t | a | c | C | C | G | T | T | C | T | T | C | T | G | C | T | T | G | T | ACACCGTACCCCTTGTTGTGGTTGTG | 127 | AAAACACAAGCAGAAGAACGGGTACG | 321. |
| G | t | a | c | g | C | G | T | T | C | T | T | C | T | G | C | T | T | G | T | ACACCGTAGGCCTTGTTGTGGTTGTG | 128 | AAAACACAAGCAGAAGAACGCGTACG | 322. |
| G | t | a | c | g | g | G | T | T | C | T | T | C | T | G | C | T | T | G | T | ACACCGTACGGGTTGTTGTGGTTGTG | 129 | AAAACACAAGCAGAAGAACCCGTACG | 323. |
| G | t | a | c | g | g | c | T | T | C | T | T | C | T | G | C | T | T | G | T | ACACCGTACGGCTTCTTCTGCTTGTG | 130 | AAAACACAAGCAGAAGAAGCCGTACG | 324. |
| G | t | a | c | g | g | c | a | T | C | T | T | C | T | G | C | T | T | G | T | ACACCGTACGGCATCTTCTGCTTGTG | 131 | AAAACACAAGCAGAAGATGCCGTACG | 325. |
| G | t | a | c | g | g | c | a | a | C | T | T | C | T | G | C | T | T | G | T | ACACCGTACGGCAACTTCTGCTTGTG | 132 | AAAACACAAGCAGAAGTTGCCGTACG | 326. |
| G | t | a | c | g | g | c | a | a | g | T | T | C | T | G | C | T | T | G | T | ACACCGTACGGCAAGTTCTGCTTGTG | 133 | AAAACACAAGCAGAACTTGCCGTACG | 327. |
| G | A | T | G | C | C | G | T | T | C | T | T | C | T | G | C | T | a | G | a | ACACCGATGCCGTTCTTCTGCTAGAG | 134 | AAAACTCTAGCAGAAGAACGGCATCG | 328. |
| G | A | T | G | C | C | G | T | T | C | T | T | C | T | G | g | T | a | G | T | ACACCGATGCCGTTCTTCTGGTAGTG | 135 | AAAACACTACCAGAAGAACGGCATCG | 329. |
| G | A | T | G | C | C | G | T | T | C | T | T | C | a | G | C | T | a | G | T | ACACCGATGCCGTTCTTCAGCTAGTG | 136 | AAAACACTAGCTGAAGAACGGCATCG | 330. |
| G | A | T | G | C | C | G | T | T | C | T | a | C | T | G | C | T | a | G | T | ACACCGATGCCGTTCTACTGCTAGTG | 137 | AAAACACTAGCAGTAGAACGGCATCG | 331. |
| G | A | T | G | C | C | G | T | T | g | T | T | C | T | G | C | T | a | G | T | ACACCGATGCCGTTGTTCTGCTAGTG | 138 | AAAACACTAGCAGAACAACGGCATCG | 332. |
| G | A | T | G | C | C | G | a | T | C | T | T | C | T | G | C | T | a | G | T | ACACCGATGCCGATCTTCTGCTAGTG | 139 | AAAACACTAGCAGAAGATCGGCATCG | 333. |
| G | A | T | G | C | g | G | T | T | C | T | T | C | T | G | C | T | a | G | T | ACACCGATGCGGTTCTTCTGCTAGTG | 140 | AAAACACTAGCAGAAGAACCGCATCG | 334. |
| G | A | T | c | C | C | G | T | T | C | T | T | C | T | G | C | T | a | G | T | ACACCGATCCCGTTCTTCTGCTAGTG | 141 | AAAACACTAGCAGAAGAACGGGATCG | 335. |
| G | t | T | G | C | C | G | T | T | C | T | T | C | T | G | C | T | a | G | T | ACACCGTTGCCGTTCTTCTGCTAGTG | 142 | AAAACACTAGCAGAAGAACGGCAACG | 336. |
| G | A | T | G | C | C | G | T | T | g | T | T | C | T | G | C | T | T | G | a | ACACCGATGCCGTTGTTCTGCTTGAG | 143 | AAAACTCAAGCAGAACAACGGCATCG | 337. |
| G | A | T | G | C | C | G | T | T | g | T | T | C | T | G | g | T | T | G | T | ACACCGATGCCGTTGTTCTGGTTGTG | 144 | AAAACACAACCAGAACAACGGCATCG | 338. |
| G | A | T | G | C | C | G | T | T | g | T | T | C | a | G | C | T | T | G | T | ACACCGATGCCGTTGTTCAGCTTGTG | 145 | AAAACACAAGCTGAACAACGGCATCG | 339. |
| G | A | T | G | C | C | G | T | T | g | T | a | C | T | G | C | T | T | G | T | ACACCGATGCCGTTGTACTGCTTGTG | 146 | AAAACACAAGCAGTACAACGGCATCG | 340. |
| G | A | T | G | C | C | G | a | T | g | T | T | C | T | G | C | T | T | G | T | ACACCGATGCCGATGTTCTGCTTGTG | 147 | AAAACACAAGCAGAACATCGGCATCG | 341. |
| G | A | T | G | C | g | G | T | T | g | T | T | C | T | G | C | T | T | G | T | ACACCGATGCGGTTGTTCTGCTTGTG | 148 | AAAACACAAGCAGAACAACCGCATCG | 342. |
| G | A | T | c | C | C | G | T | T | g | T | T | C | T | G | C | T | T | G | T | ACACCGATCCCGTTGTTCTGCTTGTG | 149 | AAAACACAAGCAGAACAACGGGATCG | 343. |
| G | t | T | G | C | C | G | T | T | g | T | T | C | T | G | C | T | T | G | T | ACACCGTTGCCGTTGTTCTGCTTGTG | 150 | AAAACACAAGCAGAACAACGGCAACG | 344. |
| G | t | T | G | C | C | G | T | T | C | T | T | C | T | G | C | T | T | G | a | ACACCGTTGCCGTTCTTCTGCTTGAG | 151 | AAAACTCAAGCAGAAGAACGGCAACG | 345. |
| G | t | T | G | C | C | G | T | T | C | T | T | C | T | G | g | T | T | G | T | ACACCGTTGCCGTTCTTCTGGTTGTG | 152 | AAAACACAACCAGAAGAACGGCAACG | 346. |
| G | t | T | G | C | C | G | T | T | C | T | T | C | a | G | C | T | T | G | T | ACACCGTTGCCGTTGTTCAGCTTGTG | 153 | AAAACACAAGCTGAAGAACGGCAACG | 347. |
| G | t | T | G | C | C | G | T | T | C | T | a | C | T | G | C | T | T | G | T | ACACCGTTGCCGTTGTACTGCTTGTG | 154 | AAAACACAAGCAGTAGAACGGCAACG | 348. |
| G | t | T | G | C | C | G | a | T | C | T | T | C | T | G | C | T | T | G | T | ACACCGTTGCCGATCTTCTGCTTGTG | 155 | AAAACACAAGCAGAAGATCGGCAACG | 349. |
| G | t | T | G | C | g | G | T | T | C | T | T | C | T | G | C | T | T | G | T | ACACCGTTGCGGTTCTTCTGCTTGTG | 156 | AAAACACAAGCAGAAGAACCGCAACG | 350. |
| G | t | T | c | C | C | G | T | T | C | T | T | C | T | G | C | T | T | G | T | ACACCGTTCCCGTTCTTCTGCTTGTG | 157 | AAAACACAAGCAGAAGAACGGGAACG | 351. |

EGFP TARGET SITE 3

| 20 | 19 | 18 | 17 | 16 | 15 | 14 | 13 | 12 | 11 | 10 | 9 | 8 | 7 | 6 | 5 | 4 | 3 | 2 | 1 | oligonucleotide 1 (5′ to 3′) | # | oligonucleotide 2 (5′ to 3′) | # |
|---|---|---|---|---|---|---|---|---|---|---|---|---|---|---|---|---|---|---|---|---|---|---|---|
| G | G | T | G | G | T | G | C | A | G | A | T | G | A | A | C | T | T | C | A | ACACCGGTGGTGGAGATGAAGTTGAG | 158 | AAAACTGAAGTTCATCTGCACCACCG | 352. |
| G | G | T | G | G | T | G | C | A | G | A | T | G | A | A | C | T | T | C | g | ACACCGGTGGTGCAGATGAACTTCTG | 159 | AAAACAGAAGTTCATCTGCACCACCG | 353. |
| G | G | T | G | G | T | G | C | A | G | A | T | G | A | A | C | T | T | g | A | ACACCGGTGGTGCAGATGAACTTGAG | 160 | AAAACTCAAGTTCATCTGCACCACCG | 354. |
| G | G | T | G | G | T | G | C | A | G | A | T | G | A | A | C | T | a | C | A | ACACCGGTGGTGCAGATGAACTACAG | 161 | AAAACTGTAGTTCATCTGCACCACCG | 355. |
| G | G | T | G | G | T | G | C | A | G | A | T | G | A | A | C | a | T | C | A | ACACCGGTGGTGCAGATGAACATCAG | 162 | AAAACTGATGTTCATCTGCACCACCG | 356. |
| G | G | T | G | G | T | G | C | A | G | A | T | G | A | A | g | T | T | C | A | ACACCGGTGGTGGAGATGAAGTTGAG | 163 | AAAACTGAACTTCATCTGCACCACCG | 357. |
| G | G | T | G | G | T | G | C | A | G | A | T | G | A | t | C | T | T | C | A | ACACCGGTGGTGGAGATGATGTTGAG | 164 | AAAACTGAAGATCATCTGCACCACCG | 358. |
| G | G | T | G | G | T | G | C | A | G | A | T | G | t | A | C | T | T | C | A | ACACCGGTGGTGGAGATGTAGTTGAG | 165 | AAAACTGAAGTACATCTGCACCACCG | 359. |
| G | G | T | G | G | T | G | C | A | G | A | T | c | A | A | C | T | T | C | A | ACACCGGTGGTGGAGATGAAGTTGAG | 166 | AAAACTGAAGTTGATCTGCACCACCG | 360. |
| G | G | T | G | G | T | G | C | A | G | A | a | G | A | A | C | T | T | C | A | ACACCGGTGGTGGAGAAGAAGTTGAG | 167 | AAAACTGAAGTTCTTCTGCACCACCG | 361. |
| G | G | T | G | G | T | G | C | A | G | t | T | G | A | A | C | T | T | C | A | ACACCGGTGGTGGAGTTGAAGTTGAG | 168 | AAAACTGAAGTTCAACTGCACCACCG | 362. |
| G | G | T | G | G | T | G | C | A | c | A | T | G | A | A | C | T | T | C | A | ACACCGGTGGTGGAGATGAAGTTGAG | 169 | AAAACTGAAGTTCATGTGCACCACCG | 363. |
| G | G | T | G | G | T | G | C | t | G | A | T | G | A | A | C | T | T | C | A | ACACCGGTGGTGGTGATGAAGTTGAG | 170 | AAAACTGAAGTTCATCAGCACCACCG | 364. |
| G | G | T | G | G | T | G | g | A | G | A | T | G | A | A | C | T | T | C | A | ACACCGGTGGTGGAGATGAAGTTGAG | 171 | AAAACTGAAGTTCATCTCCACCACCG | 365. |
| G | G | T | G | G | T | c | C | A | G | A | T | G | A | A | C | T | T | C | A | ACACCGGTGGTCCAGATGAACTTCAG | 172 | AAAACTGAAGTTCATCTGGACCACCG | 366. |
| G | G | T | G | G | a | G | C | A | G | A | T | G | A | A | C | T | T | C | A | ACACCGGTGGAGGAGATGAAGTTGAG | 173 | AAAACTGAAGTTCATCTGCTCCACCG | 367. |
| G | G | T | G | c | T | G | C | A | G | A | T | G | A | A | C | T | T | C | A | ACACCGGTGGTGGAGATGAAGTTGAG | 174 | AAAACTGAAGTTCATCTGCAGCACCG | 368. |
| G | G | T | c | G | T | G | C | A | G | A | T | G | A | A | C | T | T | C | A | ACACCGGTGGTGGAGATGAAGTTGAG | 175 | AAAACTGAAGTTCATCTGCACGACCG | 369. |
| G | G | a | G | G | T | G | C | A | G | A | T | G | A | A | C | T | T | C | A | ACACCGGAGGTGGAGATGAAGTTGAG | 176 | AAAACTGAAGTTCATCTGCACCTCCG | 370. |
| G | c | T | G | G | T | G | C | A | G | A | T | G | A | A | C | T | T | C | t | ACACCGCTGGTGGAGATGAAGTTGAG | 177 | AAAACTGAAGTTCATCTGCACCAGCG | 371. |
| G | G | T | G | G | T | G | C | A | G | A | T | G | A | A | C | T | T | g | A | ACACCGGTGGTGCAGATGAACTTGTG | 178 | AAAACACAAGTTCATCTGCACCACCG | 372. |
| G | G | T | G | G | T | G | C | A | G | A | T | G | A | A | C | a | a | C | A | ACACCGGTGGTGGAGATGAAGAAGAG | 179 | AAAACTGTTGTTCATCTGCACCACCG | 373. |
| G | G | T | G | G | T | G | C | A | G | A | T | G | A | t | g | T | T | C | A | ACACCGGTGGTGGAGATGATGTTGAG | 180 | AAAACTGAACATCATCTGCACCACCG | 374. |
| G | G | T | G | G | T | G | C | A | G | A | T | c | t | A | C | T | T | C | A | ACACCGGTGGTGCAGATCTACTTCAG | 181 | AAAACTGAAGTAGATCTGCACCACCG | 375. |
| G | G | T | G | G | T | G | C | A | G | t | a | G | A | A | C | T | T | C | A | ACACCGGTGGTGGAGTAGAAGTTGAG | 182 | AAAACTGAAGTTCTACTGCACCACCG | 376. |
| G | G | T | G | G | T | G | C | t | c | A | T | G | A | A | C | T | T | C | A | ACACCGGTGGTGGTGATGAAGTTGAG | 183 | AAAACTGAAGTTCATGAGCACCACCG | 377. |
| G | G | T | G | G | T | c | g | A | G | A | T | G | A | A | C | T | T | C | A | ACACCGGTGGTGGAGATGAAGTTGAG | 184 | AAAACTGAAGTTCATCTCGACCACCG | 378. |
| G | G | T | G | c | a | G | C | A | G | A | T | G | A | A | C | T | T | C | A | ACACCGGTGGAGGAGATGAAGTTGAG | 185 | AAAACTGAAGTTCATCTGCTGCACCG | 379. |
| G | G | a | c | G | T | G | C | A | G | A | T | G | A | A | C | T | T | C | A | ACACCGGAGGTGGAGATGAAGTTGAG | 186 | AAAACTGAAGTTCATCTGCACGTCCG | 380. |
| G | c | a | G | G | T | G | C | A | G | A | T | G | A | A | C | T | T | C | A | ACACCGCAGGTGGAGATGAAGTTGAG | 187 | AAAACTGAAGTTCATCTGCACCAGGG | 381. |
| G | c | a | c | G | T | G | C | A | G | A | T | G | A | A | C | T | T | C | A | ACACCGCACGTGGAGATGAAGTTGAG | 188 | AAAACTGAAGTTCATCTGCACGTGCG | 382. |
| G | c | a | c | G | T | G | C | A | G | A | T | G | A | A | C | T | T | C | A | ACACCGCACCTGGAGATGAAGTTGAG | 189 | AAAACTGAAGTTCATCTGCAGGTGCG | 383. |
| G | c | a | c | G | T | G | C | A | G | A | T | G | A | A | C | T | T | C | A | ACACCGCACCAGGAGATGAAGTTGAG | 190 | AAAACTGAAGTTCATCTGCTGGTGCG | 384. |
| G | c | a | c | G | T | G | C | A | G | A | T | G | A | A | C | T | T | C | A | ACACCGCACCACCAGATGAAGTTGAG | 191 | AAAACTGAAGTTCATCTGGTGGTGCG | 385. |
| G | c | a | c | G | T | G | C | A | G | A | T | G | A | A | C | T | T | C | A | ACACCGCACCAGGAGATGAAGTTGAG | 192 | AAAACTGAAGTTCATCTCGTGGTGCG | 386. |
| G | c | a | c | G | T | G | C | A | G | A | T | G | A | A | C | T | T | C | A | ACACCGCACCACGTGATGAAGTTGAG | 193 | AAAACTGAAGTTCATCACGTGGTGCG | 387. |
| G | c | a | c | G | T | G | C | A | G | A | T | G | A | A | C | T | T | C | A | ACACCGCACCACGTGATGAAGTTGAG | 194 | AAAACTGAAGTTCATGACGTGGTGCG | 388. |
| G | G | T | G | G | T | G | C | A | G | A | T | G | A | A | C | T | a | C | t | ACACCGGTGGTGCAGATGAACTACTG | 195 | AAAACAGTAGTTCATCTGCACCACCG | 389. |
| G | G | T | G | G | T | G | C | A | G | A | T | G | A | A | g | T | a | C | A | ACACCGGTGGTGCAGATGAAGTACAG | 196 | AAAACTGTACTTCATCTGCACCACCG | 390. |
| G | G | T | G | G | T | G | C | A | G | A | T | G | t | A | C | T | a | C | A | ACACCGGTGGTGCAGATGTACTACAG | 197 | AAAACTGTAGTACATCTGCACCACCG | 391. |
| G | G | T | G | G | T | G | C | A | G | A | a | G | A | A | C | T | a | C | A | ACACCGGTGGTGCAGAAGAACTACAG | 198 | AAAACTGTAGTTCTTCTGCACCACCG | 392. |
| G | G | T | G | G | T | G | C | A | c | A | T | G | A | A | C | T | a | C | A | ACACCGGTGGTGCACATGAACTACAG | 199 | AAAACTGTAGTTCATGTGCACCACCG | 393. |
| G | G | T | G | G | T | G | g | A | G | A | T | G | A | A | C | T | a | C | A | ACACCGGTGGTGGAGATGAACTACAG | 200 | AAAACTGTAGTTCATCTCCACCACCG | 394. |
| G | G | T | G | G | a | G | C | A | G | A | T | G | A | A | C | T | a | C | A | ACACCGGTGGAGCAGATGAACTACAG | 201 | AAAACTGTAGTTCATCTGCTCCACCG | 395. |
| G | G | T | c | G | T | G | C | A | G | A | T | G | A | A | C | T | a | C | A | ACACCGGTCGTGCAGATGAACTACAG | 202 | AAAACTGTAGTTCATCTGCACGACCG | 396. |
| G | c | T | G | G | T | G | C | A | G | A | T | G | A | A | C | T | a | C | A | ACACCGCTGGTGCAGATGAACTACAG | 203 | AAAACTGTAGTTCATCTGCACCAGCG | 397. |
| G | G | T | G | G | T | G | C | A | c | A | T | G | A | A | C | T | T | C | t | ACACCGGTGGTGCACATGAACTTCTG | 204 | AAAACAGAAGTTCATGTGCACCACCG | 398. |
| G | G | T | G | G | T | G | C | A | c | A | T | G | A | A | g | T | T | C | A | ACACCGGTGGTGCACATGAAGTTCAG | 205 | AAAACTGAACTTCATGTGCACCACCG | 399. |
| G | G | T | G | G | T | G | C | A | c | A | T | G | t | A | C | T | T | C | A | AGAGGGGTGGTGGAGATGTAGTTGAG | 206 | AAAACTGAAGTACATGTGCACCACCG | 400. |
| G | G | T | G | G | T | G | C | A | c | A | a | G | A | A | C | T | T | C | A | ACACCGGTGGTGCACAAGAACTTCAG | 207 | AAAACTGAAGTTCTTGTGCACCACCG | 401. |
| G | G | T | G | G | T | G | g | A | c | A | T | G | A | A | C | T | T | C | A | ACACCGGTGGTGGACATGAACTTCAG | 208 | AAAACTGAAGTTCATGTCCACCACCG | 402. |
| G | G | T | G | G | a | G | C | A | c | A | T | G | A | A | C | T | T | C | A | ACACCGGTGGAGCACATGAACTTCAG | 209 | AAAACTGAAGTTCATGTGCTCCACCG | 403. |
| G | G | T | c | G | T | G | C | A | c | A | T | G | A | A | C | T | T | C | A | ACACCGGTCGTGCACATGAACTTCAG | 210 | AAAACTGAAGTTCATGTGCACGACCG | 404. |
| G | c | T | G | G | T | G | C | A | c | A | T | G | A | A | C | T | T | C | A | ACACCGCTGGTGCACATGAACTTCAG | 211 | AAAACTGAAGTTCATGTGCACCAGCG | 405. |
| G | c | T | G | G | T | G | C | A | G | A | T | G | A | A | C | T | T | C | t | ACACCGCTGGTGCAGATGAACTTCTG | 212 | AAAACAGAAGTTCATCTGCACCAGCG | 406. |
| G | c | T | G | G | T | G | C | A | G | A | T | G | A | A | C | T | T | C | A | ACACCGCTGGTGCAGATGAAGTTCAG | 213 | AAAACTGAACTTCATCTGCACCAGCG | 407. |
| G | c | T | G | G | T | G | C | A | G | A | T | G | A | A | C | T | T | C | A | ACACCGCTGGTGGAGATGTAGTTGAG | 214 | AAAACTGAAGTACATCTGCACCAGCG | 408. |
| G | c | T | G | G | T | G | C | A | G | A | T | G | A | A | C | T | T | C | A | AGACCGCTGGTGGAGAAGAAGTTGAG | 215 | AAAACTGAAGTTCTTCTGCACCAGCG | 409. |
| G | c | T | G | G | T | G | g | A | G | A | T | G | A | A | C | T | T | C | A | ACACCGCTGGTGGAGATGAAGTTGAG | 216 | AAAACTGAAGTTCATCTCCACCAGCG | 410. |
| G | c | T | G | G | a | G | C | A | G | A | T | G | A | A | C | T | T | C | A | ACACCGCTGGAGGAGATGAAGTTGAG | 217 | AAAACTGAAGTTCATCTGCTCCAGCG | 411. |
| G | c | T | c | G | T | G | C | A | G | A | T | G | A | A | C | T | T | C | A | ACACCGCTCGTGGAGATGAAGTTGAG | 218 | AAAACTGAAGTTCATCTGCACGAGCG | 412. |

Endogenous Target 1 (VEGFA Site 1)

| 20 | 19 | 18 | 17 | 16 | 15 | 14 | 13 | 12 | 11 | 10 | 9 | 8 | 7 | 6 | 5 | 4 | 3 | 2 | 1 | oligonucleotide 1 (5′ to 3′) | # | oligonucleotide 2 (5′ to 3′) | # |
|---|---|---|---|---|---|---|---|---|---|---|---|---|---|---|---|---|---|---|---|---|---|---|---|
| G | G | G | T | G | G | G | G | G | G | A | G | T | T | T | G | C | T | C | C | ACACCGGGTGGGGGGAGTTTGCTCCG | 219 | AAAACGGAGCAAACTCCCCCCCACCG | 413. |
| | | | | | | | | | | | | | | | | | | | | | 220 | | 414. |

Endogenous Target 2 (VEGFA Site 2):

| 20 | 19 | 18 | 17 | 16 | 15 | 14 | 13 | 12 | 11 | 10 | 9 | 8 | 7 | 6 | 5 | 4 | 3 | 2 | 1 | oligonucleotide 1 (5′ to 3′) | # | oligonucleotide 2 (5′ to 3′) | # |
|---|---|---|---|---|---|---|---|---|---|---|---|---|---|---|---|---|---|---|---|---|---|---|---|
| G | A | C | C | C | C | C | T | C | C | A | C | C | C | C | G | C | C | T | C | ACACCGACCCCCTCCACCCCGCCTCG | 221 | AAAACGAGGCGGGGTGGAGGGGGTCG | 415. |
| | | | | | | | | | | | | | | | | | | | | | 222 | | 416. |

Endogenous Target 3 (VEGFA Site 3):

| 20 | 19 | 18 | 17 | 16 | 15 | 14 | 13 | 12 | 11 | 10 | 9 | 8 | 7 | 6 | 5 | 4 | 3 | 2 | 1 | oligonucleotide 1 (5′ to 3′) | # | oligonucleotide 2 (5′ to 3′) | # |
|---|---|---|---|---|---|---|---|---|---|---|---|---|---|---|---|---|---|---|---|---|---|---|---|
| G | G | T | G | A | G | T | G | A | G | T | G | T | G | T | G | C | G | T | G | ACACCGGTGAGTGAGTGTGTGCGTGG | 223 | AAAACCACGCACACACTCACTCACCG | 417. |
| | | | | | | | | | | | | | | | | | | | | | 224 | | 418. |

Endogenous Target 4 (EMX1):

| 20 | 19 | 18 | 17 | 16 | 15 | 14 | 13 | 12 | 11 | 10 | 9 | 8 | 7 | 6 | 5 | 4 | 3 | 2 | 1 | oligonucleotide 1 (5′ to 3′) | # | oligonucleotide 2 (5′ to 3′) | # |
|---|---|---|---|---|---|---|---|---|---|---|---|---|---|---|---|---|---|---|---|---|---|---|---|
| G | A | G | T | C | C | G | A | G | C | A | G | A | A | G | A | A | G | A | A | ACACCGAGTCCGAGCAGAAGAAGAAG | 225 | AAAACTTCTTCTTCTGCTCGGACTCG | 419. |
| | | | | | | | | | | | | | | | | | | | | | 226 | | 420. |

Endogenous Target 5 (RNF2):

| 20 | 19 | 18 | 17 | 16 | 15 | 14 | 13 | 12 | 11 | 10 | 9 | 8 | 7 | 6 | 5 | 4 | 3 | 2 | 1 | oligonucleotide 1 (5′ to 3′) | # | oligonucleotide 2 (5′ to 3′) | # |
|---|---|---|---|---|---|---|---|---|---|---|---|---|---|---|---|---|---|---|---|---|---|---|---|
| G | T | C | A | T | C | T | T | A | G | T | C | A | T | T | A | C | C | T | G | ACACCGTCATCTTAGTCATTACCTGG | 227 | AAAACCAGGTAATGACTAAGATGACG | 421. |
| | | | | | | | | | | | | | | | | | | | | | 228 | | 422. |

Endogenous Target 6 (FANCF):

| 20 | 19 | 18 | 17 | 16 | 15 | 14 | 13 | 12 | 11 | 10 | 9 | 8 | 7 | 6 | 5 | 4 | 3 | 2 | 1 | oligonucleotide 1 (5′ to 3′) | # | oligonucleotide 2 (5′ to 3′) | # |
|---|---|---|---|---|---|---|---|---|---|---|---|---|---|---|---|---|---|---|---|---|---|---|---|
| G | G | A | A | T | C | C | C | T | T | C | T | G | C | A | G | C | A | C | C | ACACCGGAATCCCTTCTGCAGCACCG | 229 | AAAACGGTGCTGCAGAAGGGATTCCG | 423. |

Sequences of oligonucleotides used to generate expression plasmids encoding single gRNAs/variant single gRNAs targeted to sites in the EGFP reporter gene and single gRNAs targeted to six endogenous human gene targets. #, SEQ ID NO:.

[0140] EGFP Activity Assays

[0141] U2OS.EGFP cells harboring a single integrated copy of an EGFP-PEST fusion gene were cultured as previously described (Reyon et al., Nat Biotech 30, 460-465 (2012)). For transfections, 200,000 cells were Nucleofected with the indicated amounts of sgRNA expression plasmid and pJDS246 together with 30 ng of a Td-tomato-encoding plasmid using the SE Cell Line 4D-Nucleofector™ X Kit (Lonza) according to the manufacturer's protocol. Cells were analyzed 2 days post-transfection using a BD LSRII flow cytometer. Transfections for optimizing gRNA/Cas9 plasmid concentration were performed in triplicate and all other transfections were performed in duplicate.

[0142] PCR Amplification and Sequence Verification of Endogenous Human Genomic Sites

[0143] PCR reactions were performed using Phusion Hot Start II high-fidelity DNA polymerase (NEB) with PCR primers and conditions listed in Table B. Most loci amplified successfully using touchdown PCR (98° C., 10 s; 72-62° C., −1° C./cycle, 15 s; 72° C., 30 s] 10 cycles, [98° C., 10 s; 62° C., 15 s; 72° C., 30 s] 25 cycles). PCR for the remaining targets were performed with 35 cycles at a constant annealing temperature of 68° C. or 72° C. and 3% DMSO or 1M betaine, if necessary. PCR products were analyzed on a QIAXCEL capillary electrophoresis system to verify both size and purity. Validated products were treated with ExoSap-IT (Affymetrix) and sequenced by the Sanger method (MGH DNA Sequencing Core) to verify each target site.

TABLE B

| | | | | | | | non- | |
|---|---|---|---|---|---|---|---|---|
| | | | | | | | Watson- | |
| | | | | | | Watson- | Crick | |
| Actual Target in | | SEQ ID | | SEQ ID | PCR | Crick Trans- | Trans- | Tran- |
| U2OS.EGFP cells | Forward PCR Primer | NO | Reverse PCR Primer | NO: | Conditions | versions | versions | sitions |
| | TCCAGATGGCACATTGTCAG | 436. | AGGGAGCAGGAAAGTGAGGT | 748. | DMSO | | | |
| | GGGGCCCACTCTTCTTCCAT | 437. | ACCCAGACTCCTGGTGTGGC | 749. | No DMSO | 0 | 0 | 1 |
| | GCTAAGCAGAGATGCCTATGCC | 438. | ACCACCCTTTCCCCCAGAAA | 750. | DMSO | 2 | 0 | 0 |
| | ACCCCACAGCCAGGTTTTCA | 439. | GAATCACTGCACCTGGCCATC | 751. | DMSO | 0 | 0 | 2 |
| | TGCGGCAACTTCAGACAACC | 440. | TAAAGGGCGTGCTGGGAGAG | 752. | DMSO | 1 | 1 | 0 |
| | GCATGTCAGGATCTGACCCC | 441. | TGCAGGGCCATCTTGTGTGT | 753. | DMSO | 0 | 2 | 0 |
| | CCACCACATGTTCTGGGTGC | 442. | CTGGGTCTGTTCCCTGTGGG | 754. | DMSO | 1 | 1 | 1 |
| | GGCTCTCCCTGCCCTAGTTT | 443. | GCAGGTCAAGTTGGAACCCG | 755. | DMSO | 0 | 2 | 1 |
| | GGGGCTGAGAACACATGAGATGCA | 444. | AGATTTGTGCACTGCCTGCCT | 756. | DMSO | 1 | 0 | 2 |
| | CCCGACCTCCGCTCCAAAGC | 445. | GGACCTCTGCACACCCTGGC | 757. | DMSO | 2 | 1 | 0 |
| | TGCAAGGTCGCATAGTCCCA | 446. | CAGGAGGGGGAAGTGTGTCC | 758. | DMSO | 1 | 1 | 1 |
| | GCCCATTCTTTTTGCAGTGGA | 447. | GAGAGCAAGTTTGTTCCCCAGG | 759. | DMSO | 0 | 1 | 2 |
| | GCCCCCAGCCCCTCTGTTTC | 448. | GCTGCTGGTAGGGGAGCTGG | 760. | DMSO | 1 | 2 | 0 |
| | CGGCTGCCTTCCCTGAGTCC | 449. | GGGTGACGCTTGCCATGAGC | 761. | 72 C. Anneal, | 1 | 2 | 0 |
| | | | | | 3% DMSO | | | |
| | TGACCCTGGAGTACAAAATGTTCCCA | 450. | GCTGAGACAACCAGCCCAGCT | 762. | 72 C. Anneal, | 2 | 1 | 0 |
| | | | | | 3% DMSO | | | |
| | TGCCTCCACCCTTAGCCCCT | 451. | GCAGCCGATCCACACTGGGG | 763. | DMSO | 1 | 0 | 2 |
| | AACTCAGGACAACACTGCCTGT | 452. | CCCAGGAGCAGGGTACAATGC | 764. | DMSO | 0 | 1 | 2 |
| | TCCTCCTTGGAGAGGGGCCC | 453. | CCTTGGAAGGGGCCTTGGTGG | 765. | DMSO | 0 | 3 | 0 |
| | CCGAGGGCATGGGCAATCCT | 454. | GGCTGCTGCGAGTTGCCAAC | 766. | DMSO | 0 | 1 | 3 |
| | TGCTTTGCATGGGGTCTCAGACA | 455. | GGGTTGCTTGCCCTCTGTGT | 767. | DMSO | 0 | 2 | 2 |
| | AGCTCCTTCTCATTTCTCTTCTGCTGT | 456. | CACAGAAGGATGTGTGCAGGTT | 768. | DMSO | 0 | 2 | 2 |
| | AGCAGACACAGGTGAATGCTGCT | 457. | GGTCAGGTGTGCTGCTAGGCA | 769. | DMSO | 1 | 1 | 2 |
| | CCTGTGGGGCTCTCAGGTGC | 458. | ACTGCCTGCCAAAGTGGGTGT | 770. | No DMSO TD | 1 | 1 | 2 |
| | AGCTGCACTGGGGAATGAGT | 459. | TGCCGGGTAATAGCTGGCTT | 771. | DMSO | 0 | 1 | 3 |
| | CCAGCCTGGGCAACAAAGCG | 460. | GGGGGCTTCCAGGTCACAGG | 772. | 72 C. Anneal, | 0 | 3 | 1 |
| | | | | | 3% DMSO, 6% | | | |
| | | | | | DMSO | | | |
| | TACCCCCACTGCCCCATTGC | 461. | ACAGGTCCATGCTTAGCAGAGG | 773. | DMSO | 0 | 1 | 3 |
| | | | G | | | | | |
| GGGTGATTGAAGTTTGCT | ACGGATTCACGACGGAGGTGC | 462. | CCGAGTCCGTGGCAGAGAGC | 774. | DMSO | 0/1 | 2 | 2 |
| CCAGG | | | | | | | | |
| GGGTGATTGAAGTTTGCT | | | | | | | | |
| GCAGG | | | | | | | | |
| (SEQ ID NO: 424) | | | | | | | | |
| | TGTGGTTGAAGTAGGGGACAGGT | 463. | TGGCCCAATTGGAAGTGATTTC | 775. | DMSO | 3 | 1 | 0 |
| | | | GT | | | | | |
| | TGGGATGGCAGAGTCATCAACGT | 464. | GGCCCAATCGGTAGAGGATGCA | 776. | DMSO | 0 | 3 | 1 |
| | ATGGGGCGCTCCAGTCTGTG | 465. | TGCACCCACACAGCCAGCAA | 777. | DMSO | 0 | 3 | 1 |
| | GGGGAGGGAGGACCAGGGAA | 466. | AATTAGCTGGGCGCGGTGGT | 778. | 72 C. Anneal, | 0 | 1 | 3 |
| | | | | | 3% DMSO | | | |
| | ATCCCGTGCAGGAAGTCGCC | 467. | CAGGCGGCCCCTTGAGGAAT | 779. | DMSO | 3 | 1 | 0 |
| | CCCCAACCCTTTGCTCAGCG | 468. | TGAGGAGAACACCACAGGCAGA | 780. | DMSO | 1 | 2 | 1 |
| | ATCGACGAGGAGGGGGCCTT | 469. | CCCCTCACTCAAGCAGGCCC | 781. | DMSO | 0 | 3 | 1 |
| | TGCTCAAGGGGCCTGTTCCA | 470. | CAGGGGCAGTGGCAGGAGTC | 782. | No DMSO | 1 | 3 | 0 |
| | TGCCTGGCACGCAGTAGGTG | 471. | GGGAAGGGGGAACAGGTGCA | 783. | DMSO | 0 | 0 | 5 |
| | Not optimized | | | | | 1 | 1 | 3 |
| | ACCTGGGCTTGCCACTAGGG | 472. | GCTGCTCGCAGTTAAGCACCA | 784. | DMSO | 1 | 3 | 1 |
| | GTGGCCGGGCTACTGCTACC | 473. | GGTTCCACAAGCTGGGGGCA | 785. | DMSO | 3 | 2 | 0 |
| | Not optimized | | | | | 1 | 3 | 1 |
| | GCAAGAGGCGGAGGAGACCC | 474. | AGAGTCATCCATTTCCTGGGGG | 786. | DMSO | 2 | 3 | 0 |
| | | | C | | | | | |
| | GGGGTCAGTGGTGATATCCCCCT | 475. | AGGGAATCCTTTTTCCATTGCT | 787. | 1M betaine, | 1 | 4 | 0 |
| | | | TGTTT | | TD | | | |
| | AGAGAGGCCACGTGGAGGGT | 476. | GCCTCCCCTCCTCCTTCCCA | 788. | DMSO | 1 | 3 | 1 |
| | GACAGTGCCTTGCGATGCAC | 477. | TCTGACCGGTATGCCTGACG | 789. | DMSO | 3 | 2 | 0 |
| | TGTGTGAACGCAGCCTGGCT | 478. | TGGTCTAGTACTTCCTCCAGCC | 790. | DMSO | 3 | 1 | 1 |
| | | | TT | | | | | |
| | GGTTCTCCCTTGGCTCCTGTGA | 479. | CCCACTGCTCCTAGCCCTGC | 791. | DMSO | 1 | 3 | 1 |
| | TGAAGTCAACAATCTAAGCTTCCACCT | 480. | AGCTTTGGTAGTTGGAGTCTTT | 792. | DMSO | 3 | 1 | 2 |
| | | | GAAGG | | | | | |
| | TGATTGGGCTGCAGTTCATGTACA | 481. | GCACAGCCTGCCCTTGGAAG | 793. | DMSO | 2 | 1 | 3 |
| | TCCATGGGCCCCTCTGAAAGA | 482. | AGCGGCTTCTGCTTCTGCGA | 794. | DMSO | 1 | 0 | 5 |
| | GCGGTTGGTGGGGTTGATGC | 483. | GAGTTCCTCCTCCCGCCAGT | 795. | DMSO | 2 | 0 | 4 |
| | AGGCAAGATTTTCCAGTGTGCAAGA | 484. | GCTTTTGCCTGGGACTCCGC | 796. | DMSO | 2 | 0 | 4 |
| | GCTGCTGGTCGGGCTCTCTG | 485. | GCTCTGTCCCACTTCCCCTGG | 797. | No DMSO TD | 3 | 1 | 2 |
| | GCTGCGAGGCTTCCGTGAGA | 486. | CGCCCCTAGAGCTAAGGGGGT | 798. | DMSO | 3 | 2 | 1 |
| | CCAGGAGCCTGAGAGCTGCC | 487. | AGGGCTAGGACTGCAGTGAGC | 799. | DMSO | 1 | 3 | 2 |
| | CTGTGCTCAGCCTGGGTGCT | 488. | GCCTGGGGCTGTGAGTAGTTT | 800. | DMSO | 2 | 3 | 1 |
| | AGCTCGCGCCAGATCTGTGG | 489. | ACTTGGCAGGCTGAGGCAGG | 801. | 72 C. Anneal, | 4 | 2 | 0 |
| | | | | | 3% DMSO | | | |
| | AGAGAAGTCGAGGAAGAGAGAG | 490. | CAGCAGAAAGTTCATGGTTTCG | 802. | DMSO | | | |
| | TGGACAGCTGCAGTACTCCCTG | 491. | ACTGATCGATGATGGCCTATGGG | 803. | DMSO | 0 | 0 | 2 |
| | | | T | | | | | |
| | CAAGATGTGCACTTGGGCTA | 492. | GCAGCCTATTGTCTCCTGGT | 804. | DMSO | 1 | 0 | 1 |
| | GTCCAGTGCCTGACCCTGGC | 493. | AGCATCATGCCTCCAGCTTCA | 805. | DMSO | 1 | 1 | 1 |
| | GCTCCCGATCCTCTGCCACC | 494. | GCAGCTCCCACCACCCTCAG | 806. | DMSO | 1 | 2 | 0 |
| | GGGGACAGGCAGGCAAGGAG | 495. | GTGCGTGTCCGTTCACCCCT | 807. | DMSO | 1 | 1 | 1 |
| | AAGGGGCTGCTGGGTAGGAC | 496. | CGTGATTCGAGTTCCTGGCA | 808. | DMSO | 2 | 1 | 0 |
| | GACCCTCAGGAAGCTGGGAG | 497. | CTGCGAGATGCCCCAAATCG | 809. | 1M betaine, | 1 | 0 | 2 |
| | | | | | TD | | | |
| | CCGCGGCGCTCTGCTAGA | 498. | TGCTGGGATTACAGGCGCGA | 810. | DMSO | 1 | 1 | 1 |
| | CCAGGTGGTGTCAGCGGAGG | 499. | TGCCTGGCCCTCTCTGAGTCT | 811. | DMSO | 0 | 2 | 1 |
| | CGACTCCACGGCGTCTCAGG | 500. | CAGCGCAGTCCAGCCCGATG | 812. | 1M betaine, | 2 | 1 | 0 |
| | | | | | TD | | | |
| | CTTCCCTCCCCCAGCACCAC | 501. | GCTACAGGTTGCACAGTGAGAGG | 813. | DMSO | 1 | 1 | 1 |
| | | | T | | | | | |
| | CCCCGGGGAGTCTGTCCTGA | 502. | CCCAGCCGTTCCAGGTCTTCC | 814. | 72 C. Anneal, | 1 | 0 | 2 |
| | | | | | 3% DMSO | | | |
| | GAAGCGCGAAAACCCGGCTC | 503. | TCCAGGGTCCTTCTCGGCCC | 815. | DMSO | 1 | 0 | 2 |
| | AGGGTGGTCAGGGAGGCCTT | 504. | CATGGGGCTCGGACCTCGTC | 816. | DMSO | 2 | 0 | 1 |
| | GGGAAGAGGCAGGGCTGTCG | 505. | TGCCAGGAAGGAAGCTGGCC | 817. | 72 C. Anneal, | 0 | 2 | 1 |
| | | | | | 3% DMSO | | | |
| | GAGTGACGATGAGCCCCGGG | 506. | CCCTTAGCTGCAGTCGCCCC | 818. | 68 C. Anneal | 0 | 1 | 3 |
| | | | | | 3% DMSO, | | | |
| | CCCATGAGGGGTTTGAGTGC | 507. | TGAAGATGGGCAGTTTGGGG | 819. | DMSO | 0 | 2 | 2 |
| | CACCTGGGGCATCTGGGTGG | 508. | ACTGGGGTTGGGGAGGGGAT | 820. | DMSO | 2 | 0 | 2 |
| | TCATGATCCCCAAAAGGGCT | 509. | CCATTTGTGCTGATCTGTGGGT | 821. | DMSO | 1 | 0 | 3 |
| | TGGTGCCCAGAATAGTGGCCA | 510. | AGGAAATGTGTTGTGCCAGGGC | 822. | DMSO | 1 | 2 | 1 |
| | GCCTCAGACAACCCTGCCCC | 511. | GCCAAGTGTTACTCATCAAGAAA | 823. | No DMSO TD | 2 | 1 | 1 |
| | | | GTGG | | | | | |
| | GCCGGGACAAGACTGAGTTGGG | 512. | TCCCGAACTCCCGCAAAACG | 824. | DMSO | 1 | 2 | 1 |
| | TGCTGCAGGTGGTTCCGGAG | 513. | CTGGAACCGCATCCTCCGCA | 825. | No DMSO TD | 1 | 0 | 3 |
| | ACACTGGTCCAGGTCCCGTCT | 514. | GGCTGTGCCTTCCGATGGAA | 826. | DMSO | 2 | 1 | 1 |
| CTCTCCCCCCACCCCCCC | ATCGCGCCCAAAGCACAGGT | 515. | AGGCTTCTGGAAAAGTCCTCAAT | 827. | DMSO | 3 | 0 | 2 |
| TCTGG | | | GCA | | | | | |
| (SEQ ID NO: 425) | | | | | | | | |
| | Not optimized | | | | | 1 | 1 | 2 |
| | CCCTCATGGTGGTCTTACGGCA | 516. | AGCCACACATCTTTCTGGTAGGG | 828. | DMSO | 1 | 1 | 2 |
| | TGCGTCGCTCATGCTGGGAG | 517. | AGGGTGGGGTGTACTGGCTCA | 829. | DMSO | 0 | 3 | 1 |
| | GAGCTGAGACGGCACCACTG | 518. | TGGCCTTGAACTCTTGGGCT | 830. | 1M betaine, | 0 | 1 | 3 |
| | | | | | TD | | | |
| | Not optimized | | | | | 1 | 2 | 1 |
| | AGTGAGAGTGGCACGAACCA | 519. | CAGTAGGTGGTCCCTTCCGC | 831. | DMSO | 2 | 1 | 1 |
| | Not optimized | | | 832. | | 1 | 1 | 3 |
| | GGGAGAACCTTGTCCAGCCT | 520. | AAGCCGAAAAGCTGGGCAAA | 833. | DMSO | 0 | 2 | 3 |
| | CTTCCCAGTGTGGCCCGTCC | 521. | ACACAGTCAGAGCTCCGCCG | 834. | DMSO | 1 | 1 | 3 |
| | Not optimized | | | | | 1 | 0 | 4 |
| | CTGAGAGGGGGAGGGGGAGG | 522. | TCGACTGGTCTTGTCCTCCCA | 835. | 68 C. Anneal, | 3 | 0 | 2 |
| | | | | | 3% DMSO | | | |
| | CAGCCTGCTGCATCGGAAAA | 523. | TGCAGCCAAGAGAAAAAGCCT | 836. | 1M betaine, | 1 | 0 | 4 |
| | | | | | TD | | | |
| | TCCCTCTGACCCGGAACCCA | 524. | ACCCGACTTCCTCCCCATTGC | 837. | DMSO | 2 | 1 | 2 |
| | TGGGGGTTGCGTGCTIGICA | 525. | GCCAGGAGGACACCAGGACC | 838. | DMSO | 4 | 1 | 0 |
| | ATCAGGTGCCAGGAGGACAC | 526. | GGCCTGAGAGTGGAGAGTGG | 839. | DMSO | 4 | 1 | 0 |
| | Not optimized | | | | | 1 | 4 | 0 |
| | TGAGCCACATGAATCAAGGCCTCC | 527. | ACCTCTCCAAGTCTCAGTAACTCT | 840. | DMSO | 1 | 3 | 1 |
| | | | CT | | | | | |
| | GGTCCCTCTGTGCAGTGGAA | 528. | CTTTGGTGGACCTGCACAGC | 841. | DMSO | 2 | 2 | 2 |
| | GCGAGGCTGCTGACTTCCCT | 529. | GCTGGGACTACAGACATGTGCCA | 842. | DMSO | 2 | 2 | 2 |
| ATTTCCTCCCCCCCC- | ATTGCAGGCGTGTCCAGGCA | 530. | AAATCCTGCATGGTGATGGGAGT | 843. | DMSO | 1 | 1 | 5 |
| CCTCAGG | | | | | | | | |
| (SEQ ID NO: 426) | | | | | | | | |
| | TGCTCTGCCATTTATGTCCTATGAACT | 531. | ACAGCCTCTTCTCCATGACTGAGC | 844. | DMSO | 1 | 3 | 2 |
| | TCCGCCCAAACAGGAGGCAG | 532. | GCGGTGGGGAAGCCATTGAG | 845. | DMSO | 2 | 3 | 1 |
| | GGGGGTCTGGCTCACCTGGA | 533. | CCTGTCGGGAGAGTGCCTGC | 846. | DMSO | 3 | 1 | 2 |
| | TCCTGGTTCATTTGCTAGAACTCTGGA | 534. | ACTCCAGATGCAACCAGGGCT | 847. | DMSO | 3 | 2 | 1 |
| | CGTGTGGTGAGCCTGAGTCT | 535. | GCTTCACCGTAGAGGCTGCT | 848. | DMSO | 3 | 0 | 3 |
| | AGGCCCTGATAATTCATGCTACCAA | 536. | TCAGTGACAACCTTTTGTATTCGG | 849. | DMSO | 0 | 2 | 4 |
| | | | CA | | | | | |
| | Not optimized | | | | | 2 | 2 | 2 |
| | | 537. | | | | | | |
| | TCCAGATGGCACATTGTCAG | 538. | AGGGAGCAGGAAAGTGAGGT | 850. | DMSO | | | |
| | GCAGGCAAGCTGTCAAGGGT | 539. | CACCGACACACCCACTCACC | 851. | DMSO | 0 | 0 | 1 |
| | GAGGGGGAAGTCACCGACAA | 540. | TACCCGGGCCGTCTGTTAGA | 852. | DMSO | 0 | 0 | 2 |
| | GACACCCCACACACTCTCATGC | 541. | TGAATCCCTTCACCCCCAAG | 853. | DMSO | 1 | 0 | 1 |
| | TCCTTTGAGGTTCATCCCCC | 542. | CCAATCCAGGATGATTCCGC | 854. | DMSO | 1 | 0 | 1 |
| | CAGGGCCAGGAACACAGGAA | 543. | GGGAGGTATGTGCGGGAGTG | 855. | DMSO | 1 | 1 | 0 |
| | TGCAGCCTGAGTGAGCAAGTGT | 544. | GCCCAGGTGCTAAGCCCCTC | 856. | DMSO | 1 | 0 | 1 |
| | TACAGCCTGGGTGATGGAGC | 545. | TGTGTCATGGACTTTCCCATTGT | 857. | 1M betaine, | 1 | 1 | 0 |
| | | | | | TD | | | |
| | GGCAGGCATTAAACTCATCAGGTCC | 546. | TCTCCCCCAAGGTATCAGAGAGCT | 858. | DMSO | 1 | 1 | 0 |
| | GGGCCTCCCTGCTGGTTCTC | 547. | GCTGCCGTCCGAACCCAAGA | 859. | DMSO | 0 | 1 | 1 |
| | ACAAACGCAGGTGGACCGAA | 548. | ACTCCGAAAATGCCCCGCAGT | 860. | DMSO | 1 | 1 | 0 |
| | AGGGGAGGGGACATTGCCT | 549. | TTGAGAGGGTTCAGTGGTTGC | 861. | DMSO | 1 | 0 | 1 |
| | CTAATGCTTACGGCTGCGGG | 550. | AGCCAACGGCAGATGCAAAT | 862. | DMSO | 1 | 0 | 1 |
| | GAGCGAAGTTAACCCACCGC | 551. | CACACATGCACATGCCCCTG | 863. | 68 C., 3% | 2 | 0 | 0 |
| | | | | | DMSO | | | |
| | GCATGTGTCTAACTGGAGACAATAGCA | 552. | TCCCCCATATCAACACACACA | 864. | DMSO | 2 | 0 | 0 |
| | GCCCCTCCCGCCTTTTGTGT | 553. | TGGGCAAAGGACATGAAACAGAC | 865. | DMSO | 2 | 0 | 0 |
| | | | A | | | | | |
| | GCCTCAGCTCTGCTCTTAAGCCC | 554. | ACGAACAGATCATTTTTCATGGCT | 866. | DMSO | 2 | 0 | 0 |
| | | | TCC | | | | | |
| | CTCCAGAGCCTGGCCTACCA | 555. | CCCTCTCCGGAAGTGCCTTG | 867. | DMSO | 0 | 1 | 1 |
| | TCTGTCACCACACAGTTACCACC | 556. | GTTGCCTGGGGATGGGGTAT | 868. | DMSO | 0 | 1 | 1 |
| | GGGGACCCTCAAGAGGCACT | 557. | GGGCATCAAAGGATGGGGAT | 869. | DMSO | 2 | 0 | 1 |
| | TGTGGAGGGTGGGACCTGGT | 558. | ACAGTGAGGTGCGGTCTTTGGG | 870. | DMSO | 1 | 0 | 2 |
| | CGGGGTGGCAGTGACGTCAA | 559. | GGTGCAGTCCAAGAGCCCCC | 871. | DMSO | 0 | 0 | 3 |
| | AGCTGAGGCAGAGTCCCCGA | 560. | GGGAGACAGAGCAGCGCCTC | 872. | DMSO | 1 | 1 | 1 |
| | ACCACCAGACCCCACCTCCA | 561. | AGGACGACTTGTGCCCCATTCA | 873. | 72 C. Anneal, | 1 | 1 | 1 |
| | | | | | 3% DMSO | | | |
| | GGGTCAGGACGCAGGTCAGA | 562. | TCCACCCACCCACCCATCCT | 874. | 72 C. Anneal, | 2 | 0 | 1 |
| | | | | | 3% DMSO | | | |
| | ACACTCTGGGCTAGGTGCTGGA | 563. | GCCCCCTCACCACATGATGCT | 875. | DMSO | 2 | 0 | 1 |
| | GGGGCCATTCCTCTGCTGCA | 564. | TGGGGATCCTTGCTCATGGC | 876. | DMSO | 3 | 0 | 0 |
| | ACACACTGGCTCGCATTCACCA | 565. | CCTGCACGAGGCCAGGTGTT | 877. | DMSO | 2 | 1 | 0 |
| | TGGGCACGTAGTAAACTGCACCA | 566. | CTCGCCGCCGTGACTGTAGG | 878. | DMSO | 0 | 3 | 1 |
| | TCAGCTGGTCCTGGGCTTGG | 567. | AGAGCACTGGGTAGCAGTCAGT | 879. | DMSO | 2 | 1 | 0 |
| | AGACACAGCCAGGGCCTCAG | 568. | GGTGGGCGTGTGTGTGTACC | 880. | 68 C., 3% | 1 | 1 | 1 |
| | | | | | DMSO | | | |
| | ACACTCTCACACACGCACCAA | 569. | GAGAAGTCAGGGCTGGCGGG | 881. | 72 C. Anneal, | 1 | 2 | 0 |
| | | | | | 3% DMSO | | | |
| | ACTGCCTGCATTTCCCCGGT | 570. | TGGTGAGGGCTTCAGGGAGC | 882. | DMSO | 1 | 1 | 1 |
| | GCCAGGTTCATTGACTGCCC | 571. | TCCTTCTACACATCGGCGGC | 883. | DMSO | 2 | 1 | 0 |
| | CGAGGGAGCCGAGTTCGTAA | 572. | CTGACCTGGGGCTCTGGTAC | 884. | DMSO | 1 | 2 | 0 |
| | TCCTCGGGAAGTCATGGCTTCA | 573. | GCACTGAGCAACCAGGAGCAC | 885. | DMSO | 2 | 1 | 0 |
| | Not optimized | | | | | 1 | 0 | 3 |
| | TAAACCGTTGCCCCCGCCTC | 574. | GCTCCCCTGCCAGGTGAACC | 886. | DMSO | 2 | 1 | 1 |
| | CCTGCTGAGACTCCAGGTCC | 575. | CTGCGGAGTGGCTGGCTATA | 887. | DMSO | 2 | 0 | 2 |
| | CTCGGGGACTGACAAGCCGG | 576. | GGAGCAGCTCTTCCAGGGCC | 888. | DMSO | 3 | 0 | 1 |
| | CCCCGACCAAAGCAGGAGCA | 577. | CTGGCAGCCTCTGGATGGGG | 889. | DMSO | 1 | 2 | 1 |
| | Not optimized | | | | | 0 | 3 | 1 |
| | ATTTCAGAGCCCCGGGGAAA | 578. | AGGCCGCGGTGTTATGGTTA | 890. | DMSO | 1 | 2 | 1 |
| | GCCAGTGGCTTAGTGTCTTTGTGT | 579. | TGACATATTTTCCTGGGCCATGGG | 891. | DMSO | 2 | 1 | 1 |
| | | | T | | | | | |
| | TGCCAGAAGAACATGGGCCAGA | 580. | CCATGCTGACATCATATACTGGGA | 892. | DMSO | 3 | 1 | 0 |
| | | | AGC | | | | | |
| | GCGTGTCTCTGTGTGCGTGC | 581. | CCAGGCTGGGCACACAGGTT | 893. | DMSO | 3 | 1 | 0 |
| | Not optimized | | | | | 2 | 2 | 0 |
| | TGCCCAGTCCAATATTTCAGCAGCT | 582. | AGGATGAGTTCATGTCCTTTGTG | 894. | DMSO | 2 | 2 | 0 |
| | | | GGG | | | | | |
| | GGGTGAAAATTTGGTACTGTTAGCTGT | 583. | AATGACTCATTCCCTGGGTATCTC | 895. | DMSO | 2 | 2 | 0 |
| | | | CCA | | | | | |
| | TGCCCCATCAATCACCTCGGC | 584. | CAAGGTCGGCAGGGCAGTGA | 896. | DMSO | 1 | 2 | 2 |
| | GCCTCCTCTGCCGCTGGTAA | 585. | TGAGAGTTCCTGTTGCTCCACACT | 897. | DMSO | 1 | 2 | 2 |
| | Not optimized | | | | | 2 | 2 | 1 |
| | GCCACCAAAATAGCCAGCGT | 586. | ACATGCATCTGTGTGTGCGT | 898. | DMSO | 3 | 0 | 2 |
| | ACAGACTGACCCTTGAAAAATACCAGT | 587. | TGTATCTTTCTTGCCAATGGTTTTC | 899. | DMSO | 2 | 1 | 2 |
| | | | CC | | | | | |
| | AGCCAAATTTCTCAACAGCAGCACT | 588. | TCCTGGAGAGCAGGCATTTTTGT | 900. | DMSO | 3 | 1 | 1 |
| | ACCTCCTTGTGCTGCCTGGC | 589. | GGCGGGAAGGTAACCCTGGG | 901. | DMSO | 2 | 1 | 2 |
| | CACAAAGCTCTACCTTTCCAGTAGTGT | 590. | TGATCCGATGGTTGTTCACAGCT | 902. | DMSO | 3 | 1 | 1 |
| | TGTGGGGATTACCTGCCTGGC | 591. | ACGCACAAAAATGCCCTTGTCA | 903. | DMSO | 2 | 2 | 1 |
| | TGAGGCAGACCAGTCATCCAGC | 592. | GCCCGAGCACAGTGTAGGGC | 904. | DMSO | 2 | 3 | 0 |
| | ATTAGCTGGGCGTGGCGGAG | 593. | ACTGCATCTCATCTCAGGCAGCT | 905. | DMSO | 2 | 1 | 3 |
| | TGAAGCAGAAGGAGTGGAGAAGGA | 594. | TCAGCTTCACATCTGTTTCAGTTC | 906. | DMSO | 4 | 0 | 2 |
| | | | AGT | | | | | |
| | TGGTGGAGTGTGTGTGTGGT | 595. | AGAGCAGAAAGAGAGTGCCCA | 907. | DMSO | 1 | 3 | 2 |
| | GCCCCTGTACGTCCTGACAGC | 596. | TGCACAAGCCACTTAGCCTCTCT | 908. | DMSO | 3 | 1 | 2 |
| | AGCGCAGGTAAACAGGCCCA | 597. | TCTCTCGCCCCGTTTCCTTGT | 909. | DMSO | 3 | 1 | 2 |
| | ATGGGTGCCAGGTACCACGC | 598. | ACAGCAGGAAGGAGCCGCAG | 910. | DMSO | 2 | 3 | 1 |
| | CGGGCGGGTGGACAGATGAG | 599. | AGGAGGTCTCGAGCCAGGGG | 911. | DMSO | 2 | 3 | 1 |
| | TCAACCTAGTGAACACAGACCACTGA | 600. | GTCTATATACAGCCCACAACCTCA | 912. | DMSO | 1 | 2 | 3 |
| | | | TGT | | | | | |
| | GCCAGGGCCAGTGGATTGCT | 601. | TGTCATTTCTTAGTATGTCAGCCG | 913. | DMSO | 2 | 4 | 0 |
| | | | GA | | | | | |
| | GAGCCCCACCGGTTCAGTCC | 602. | GCCAGAGCTACCCACTCGCC | 914. | DMSO | 1 | 3 | 2 |
| | | 603. | | | | | | |
| | GGAGCAGCTGGTCAGAGGGG | 604. | GGGAAGGGGGACACTGGGGA | 915. | DMSO | | | |
| | TCTCTCCTTCAACTCATGACCAGCT | 605. | ATCTGCACATGTATGTACAGGAG | 916. | DMSO | 0 | 1 | 1 |
| | | | TCAT | | | | | |
| AAGACAGAGGAGAAGAAG | TGGGGAATCTCCAAAGAACCCCC | 606. | AGGGTGTACTGTGGGAACTTTGC | 917. | DMSO | 2 | 1 | 1 |
| AAGGG | | | A | | | | | |
| (SEQ ID NO: 427) | | | | | | | | |
| | GATGGCCCCACTGAGCACGT | 607. | ACTTCGTAGAGCCTTAAACATGTG | 918. | DMSO | 1 | 0 | 2 |
| | | | GC | | | | | |
| | AGGATTAATGTTTAAAGTCACTGGTGG | 608. | TCAAACAAGGTGCAGATACAGCA | 919. | 1M betaine, | 1 | 0 | 2 |
| | | | | | TD | | | |
| | TCCAAGCCACTGGTTTCTCAGTCA | 609. | TGCTCTGTGGATCATATTTTGGGG | 920. | DMSO | 0 | 1 | 2 |
| | | | GA | | | | | |
| | ACTTTCAGAGCTTGGGGCAGGT | 610. | CCCACGCTGAAGTGCAATGGC | 921. | DMSO | 1 | 1 | 1 |
| | CAAAGCATGCCTTTCAGCCG | 611. | GGCTCTTCGATTTGGCACCT | 922. | 1M betaine, | 1 | 1 | 1 |
| | | | | | TD | | | |
| | Not optimized | | | | | 1 | 0 | 2 |
| | GGACTCCCTGCAGCTCCAGC | 612. | AGGAACACAGGCCAGGCTGG | 923. | 72 C. Anneal, | 0 | 0 | 3 |
| | | | | | 6% DMSO | | | |
| | CCCTTTAGGCACCTTCCCCA | 613. | CCGACCTTCATCCCTCCTGG | 924. | DMSO | 0 | 1 | 2 |
| | TGATTCTGCCTTAGAGTCCCAGGT | 614. | TGGGCTCTGTGTCCCTACCCA | 925. | DMSO | 0 | 3 | 0 |
| | Not optimized | | | | | 2 | 1 | 0 |
| | AGGCAGGAGAGCAAGCAGGT | 615. | ACCCTGACTACTGACTGACCGCT | 926. | DMSO | 0 | 1 | 2 |
| | CTCCCCATTGCGACCCGAGG | 616. | AGAGGCATTGACTTGGAGCACCT | 927. | DMSO | 1 | 2 | 0 |
| | CTGGAGCCCAGCAGGAAGGC | 617. | CCTCAGGGAGGGGGCCTGAT | 928. | DMSO | 1 | 2 | 0 |
| | ACTGTGGGCGTTGTCCCCAC | 618. | AGGTCGGTGCAGGGTTTAAGGA | 929. | DMSO | 1 | 0 | 3 |
| | GGCGCTCCCTTTTTCCCTTTGT | 619. | CGTCACCCATCGTCTCGTGGA | 930. | DMSO | 2 | 0 | 2 |
| | TGCCATCTATAGCAGCCCCCT | 620. | GCATCTTGCTAACCGTACTTCTTC | 931. | DMSO | 1 | 0 | 3 |
| | | | TGA | | | | | |
| | GTGGAGACGCTAAACCTGTGAGGT | 621. | GCTCCTGGCCTCTTCCTACAGC | 932. | DMSO | 1 | 2 | 1 |
| | CCGAACTTCTGCTGAGCTTGATGC | 622. | CCAAGTCAATGGGCAACAAGGGA | 933. | DMSO | 0 | 2 | 2 |
| | Not optimized | | | | | 1 | 1 | 2 |
| | TGCCCCCAAGACCTTTCTCC | 623. | ATGGCAGGCAGAGGAGGAAG | 934. | DMSO | 2 | 0 | 2 |
| | GGGTGGGGCCATTGTGGGTT | 624. | CTGGGGCCAGGGTTTCTGCC | 935. | DMSO | 3 | 0 | 1 |
| | TGGAGAACATGAGAGGCTTGCAA | 625. | TCCTTCTGTAGGCAATGGGAACA | 936. | DMSO | 3 | 0 | 1 |
| | | | A | | | | | |
| | GCCACATGGTAGAAGTCGGC | 626. | GGCAGATTTCCCCCATGCTG | 937. | 1M betaine, | 1 | 2 | 1 |
| | | | | | TD | | | |
| | TGTACACCCCAAGTCCTCCC | 627. | AAGGGGAGTGTGCAAGCCTC | 938. | DMSO | 3 | 1 | 0 |
| | AGGTCTGGCTAGAGATGCAGCA | 628. | AGTCCAACACTCAGGTGAGACCC | 939. | DMSO | 3 | 1 | 0 |
| | | | T | | | | | |
| | CCAAGAGGACCCAGCTGTTGGA | 629. | GGGTATGGAATTCTGGATTAGCA | 940. | DMSO | 0 | 2 | 2 |
| | | | GAGC | | | | | |
| | ACCATCTCTTCATTGATGAGTCCCAA | 630. | ACACTGTGAGTATGCTTGGCGT | 941. | DMSO | 2 | 2 | 0 |
| | GGCTGCGGGGAGATGAGCTC | 631. | TCGGATGCTTTTCCACAGGGCT | 942. | DMSO | 2 | 2 | 1 |
| | TCTTCCAGGAGGGCAGCTCC | 632. | CCAATCCTGAGCTCCTACAAGGCT | 943. | DMSO | 1 | 0 | 4 |
| | GAGCTGCACTGGATGGCACT | 633. | TGCTGGTTAAGGGGTGTTTTGGA | 944. | DMSO | 1 | 1 | 3 |
| | TCTGGGAAGGTGAGGAGGCCA | 634. | TGGGGGACAATGGAAAAGCAAT | 945. | DMSO | 0 | 2 | 3 |
| | | | GA | | | | | |
| | CTTGCTCCCAGCCTGACCCC | 635. | AGCCCTTGCCATGCAGGACC | 946. | DMSO | 3 | 1 | 1 |
| | GGGATTTTTATCTGTTGGGTGCGAA | 636. | AACCACAGATGTACCCTCAAAGCT | 947. | DMSO | 2 | 2 | 1 |
| | ACCCATCAGGACCGCAGCAC | 637. | TCTGGAACCTGGGAGGCGGA | 948. | 72 C. Anneal, | 3 | 1 | 1 |
| | | | | | 3% DMSO | | | |
| | CGTCCCTCACAGCCAGCCTC | 638. | CCTCCTTGGGCCTGGGGTTC | 949. | DMSO | 1 | 3 | 1 |
| | CCCTCTGCAAGGTGGAGTCTCC | 639. | AGATGTTCTGTCCCCAGGCCT | 950. | DMSO | 1 | 3 | 1 |
| | GGCTTCCACTGCTGAAGGCCT | 640. | TGCCGCTCCACATACCCTCC | 951. | DMSO | 2 | 1 | 2 |
| | AGCATTGCCTGTCGGGTGATGT | 641. | AGCACCTATTGGACACTGGTTCTC | 952. | DMSO | 1 | 3 | 1 |
| | | | T | | | | | |
| | TCTAGAGCAGGGGCACAATGC | 642. | TGGAGATGGAGCCTGGTGGGA | 953. | DMSO | 2 | 2 | 1 |
| | GGTCTCAGAAAATGGAGAGAAAGCACG | 643. | CCCACAGAAACCTGGGCCCT | 954. | DMSO | 1 | 2 | 3 |
| | GGTTGCTGATACCAAAACGTTTGCCT | 644. | TGGGTCCTCTCCACCTCTGCA | 955. | DMSO | 0 | 3 | 3 |
| | ACTCTCCTTAAGTACTGATATGGCTGT | 645. | CAGAATCTTGCTCTGTTGCCCA | 956. | DMSO | 0 | 4 | 2 |
| | Not optimized | | | | | 2 | 2 | 2 |
| | Not optimized | | | | | 2 | 2 | 2 |
| | CAATGCCTGCAGTCCTCAGGA | 646. | TCCCAAGAGAAAACTCTGTCCTGA | 957. | DMSO | 4 | 1 | 1 |
| | | | CA | | | | | |
| | GCATTGGCTGCCCAGGGAAA | 647. | TGGCTGTGCTGGGCTGTGTT | 958. | DMSO | 2 | 2 | 2 |
| | CCACAAGCCTCAGCCTACCCG | 648. | ACAGGTGCCAAAACACTGCCT | 959. | DMSO | 2 | 1 | 3 |
| TCATTGCAGCAGAAGAAG | GCCTCTTGCAAATGAGACTCCTTT | 649. | CGATCAGTCCCCTGGCGTCC | 960. | DMSO | 2/1 | 2/3 | 2 |
| AAAGG | | | | | | | | |
| TCATTGTAGCAGAAGAAG | | | | | | | | |
| AAAGG | | | | | | | | |
| (SEQ ID NO: 428) | | | | | | | | |
| | TCCCAGAATCTGCCTCCGCA | 650. | AGGGGTTTCCAGGCACATGGG | 961. | DMSO | 0 | 4 | 2 |
| | | 651. | | 962. | | | | |
| | TCCTAAAAATCAGTTTTGAGATTTACTTCC | 652. | AAAGTGTTAGCCAACATACAGAA | 963. | DMSO | | | |
| | | | GTCAGGA | | | | | |
| GGTATCTAAGTCATTACC | ACATCTGGGGAAAGCAAAAGTCAACA | 653. | TGTCTGAGTATCTAGGCTAAAAG | 964. | DMSO | 1/2 | 1 | 1 |
| TGTGG | | | TGGT | | | | | |
| GGTATCTAAGTCAATACC | | | | | | | | |
| TGTGG | | | | | | | | |
| (SEQ ID NO: 429) | | | | | | | | |
| | ACGATCTTGUTCATTTCCCTGTACA | 654. | AGTGCTTTGTGAACTGAAAAGCA | 965. | DMSO | 0 | 3 | 0 |
| | | | AACA | | | | | |
| | GCACCTTGGTGCTGCTAAATGCC | 655. | GGGCAACTGAACAGGCATGAATG | 966. | DMSO | 1 | 2 | 0 |
| | | | G | | | | | |
| | AACTGTCCTGCATCCCCGCC | 656. | GGTGCACCTGGATCCACCCA | 967. | DMSO | 1 | 1 | 1 |
| | Not optimized | | | | | 1 | 1 | 1 |
| | CATCACCCTCCACCAGGCCC | 657. | ACCACTGCTGCAGGCTCCAG | 968. | 72 C. Anneal, | 0 | 3 | 0 |
| | | | | | 3% DMSO | | | |
| | Not optimized | | | | | 2 | 0 | 2 |
| | CCTGACCCGTGGTTCCCGAC | 658. | TGGTGCGTGGTGTGTGTGGT | 969. | 72 C. Anneal, | 1 | 2 | 1 |
| | | | | | 3% DMSO | | | |
| | TGGGAACATTGGAGAAGTTTCCTGA | 659. | CCATGTGACTACTGGGCTGCCC | 970. | DMSO | 1 | 1 | 2 |
| | AGCCTTGGCAAGCAACTCCCT | 660. | GGTTCTCTCTCTCAGAAAAGAAA | 971. | DMSO | 1 | 0 | 3 |
| | | | GAGG | | | | | |
| | GGCAGCGGACTTCAGAGCCA | 661. | GCCAGAGGCTCTCAGCAGTGC | 972. | DMSO | 1 | 0 | 3 |
| | CCAGCCTGGTCAATATGGCA | 662. | ACTGTGCCCAGCCCCATATT | 973. | DMSO | 2 | 1 | 1 |
| | ATGCCAACACTCGAGGGGCC | 663. | CGGGTTGTGGCACCGGGTTA | 974. | DMSO | 2 | 1 | 1 |
| | TTGCTCTAGTGGGGAGGGGG | 664. | AGAGTTCAGGCATGAAAAGAAGC | 975. | DMSO | 3 | 0 | 1 |
| | | | AACA | | | | | |
| | AGCTGAAGATAGCAGTGTTTAAGCCT | 665. | TGCAATTTGAGGGGCTCTCTTCA | 976. | DMSO | 1 | 1 | 2 |
| | AGTCACTGGAGTAAGCCTGCCT | 666. | TGCCAGCCAAAAGTTGTTAGTGT | 977. | DMSO | 2 | 0 | 2 |
| | | | GT | | | | | |
| | GGGTCTCCCTCAGTGCCCTG | 667. | TGTGTGGTAGGGAGCAAAACGAC | 978. | DMSO | 2 | 0 | 2 |
| | | | A | | | | | |
| | TGGGGGCTGTTAAGAGGCACA | 668. | TGACCACACACACCCCCACG | 979. | DMSO | 1 | 2 | 1 |
| | TCAAAACAGATTGACCAAGGCCAAAT | 669. | TGTGTTTTTAAGCTGCACCCCAGG | 980. | DMSO | 1 | 0 | 3 |
| | TCTGGCACCAGGACTGATTGTACA | 670. | GCACGCAGCTGACTCCCAGA | 981. | DMSO | 1 | 2 | 1 |
| | Not optimized | | | | | 1 | 0 | 3 |
| | AGCATCTGTGATACCCTACCTGTCT | 671. | ACCAGGGCTGCCACAGAGTC | 982. | DMSO | 1 | 0 | 3 |
| | TAGTCTTGTTGCCCAGGCTG | 672. | CTCGGCCCCTGAGAGTTCAT | 983. | DMSO | 1 | 2 | 1 |
| TCCATCTCACTCATTACC | CTGCAACCAGGGCCCTTACC | 673. | GAGCAGCAGCAAAGCCACCG | 984. | DMSO | 1 | 1 | 2 |
| TGAGGTCCATCTCACTCA | | | | | | | | |
| TTACCTGATG | | | | | | | | |
| (SEQ ID NO: 430) | | | | | | | | |
| | GCCTGGAGAGCAAGCCTGGG | 674. | AGCCGAGACAATCTGCCCCG | 985. | DMSO | 1 | 1 | 2 |
| TTTATATTAGTGATTACC | AGTGAAACAAACAAGCAGCAGTCTGA | 675. | GGCAGGTCTGACCAGTGGGG | 986. | No DMSO TD | 1 | 2 | 1 |
| TGCGG | | | | | | | | |
| (SEQ ID NO: 431) | | | | | | | | |
| | AGGCTCAGAGAGGTAAGCAATGGA | 676. | TGAGTAGACAGAAATGTTACCGG | 987. | DMSO | 3 | 0 | 2 |
| | | | TGTT | | | | | |
| | TCAGAGATGTTAAAGCCTTGGTGGG | 677. | AGTGAACCAAGGGAATGGGGGA | 988. | DMSO | 3 | 0 | 2 |
| | TGTGCTTTCTGGGGTAGTGGCA | 678. | CACCTCAGCCCTGTAGTCCTGG | 989. | DMSO | 0 | 4 | 1 |
| | CCATTGGGTGACTGAATGCACA | 679. | GCCACTGTCCCCAGCCTATT | 990. | 1M betaine, | 1 | 3 | 1 |
| | | | | | TD | | | |
| | ACCAAGAAAGTGAAAAGGAAACCC | 680. | TGAGATGGCATACGATTTACCCA | 991. | DMSO | 1 | 2 | 2 |
| | AGGGTGGGGACTGAAAGGAGCT | 681. | TGGCATCACTCAGAGATTGGAAC | 992. | DMSO | 3 | 1 | 1 |
| | | | ACA | | | | | |
| | ACCAGTGCTGTGTGACCTTGGA | 682. | TCCTATGGGAGGGGAGGCTTCT | 993. | DMSO | 3 | 1 | 1 |
| | CCAGGTGTGGTGGTTCATGAC | 683. | GCATACGGCAGTAGAATGAGCC | 994. | 68 C., 3% | 4 | 0 | 1 |
| | | | | | DMSO | | | |
| | CAGGCGCTGGGTTCTTAGCCT | 684. | CCTTCCTGGGCCCCATGGTG | 995. | DMSO | 2 | 3 | 0 |
| | TGGGGTCCAAGATGTCCCCT | 685. | TGAAACTGCTTGATGAGGTGTGG | 996. | DMSO | 1 | 2 | 2 |
| | | | A | | | | | |
| | GCTGGGCTTGGTGGTATATGC | 686. | ACTTGCAAAGCTGATAACTGACT | 997. | DMSO | 5 | 0 | 1 |
| | | | GA | | | | | |
| | AGTTGGTGTCACTGACAATGGGA | 687. | CGCAGCGCACGAGTTCATCA | 998. | DMSO | 3 | 0 | 3 |
| | AGAGGAGGCACAATTCAACCCCT | 688. | GGCTGGGGAGGCCTCACAAT | 999. | DMSO | 1 | 1 | 4 |
| | GGGAAAGTTTGGGAAAGTCAGCA | 689. | AGGACAAGCTACCCCACACC | 1000. | DMSO | 1 | 3 | 2 |
| | TGGTGCATCAAAGGGTTGCTTCT | 690. | TCATTCCAGCACGCCGGGAG | 1001. | DMSO | 0 | 3 | 3 |
| | CCCAGGCTGCCCATCACACT | 691. | TGGAGTAAGTATACCTTGGGGAC | 1002. | DMSO | 1 | 3 | 2 |
| | | | CT | | | | | |
| | TCAGTGCCCCTGGGTCCTCA | 692. | TGTGCAAATACCTAGCACGGTGC | 1003. | DMSO | 4 | 2 | 0 |
| | AGCACTCCCTTTTGAATTTTGGTGCT | 693. | ACTGAAGTCCAGCCTCTTCCATTT | 1004. | DMSO | 2 | 1 | 3 |
| | | | CA | | | | | |
| | GAAACCGGTCCCTGGTGCCA | 694. | GGGGAGTAGAGGGTAGTGTTGC | 1005. | DMSO | 2 | 0 | 4 |
| | | | C | | | | | |
| | TTGCGGGTCCCTGTGGAGTC | 695. | AGGTGCCGTGTTGTGCCCAA | 1006. | DMSO | 1 | 2 | 3 |
| | | 696. | | 1007. | | | | |
| | GCCCTACATCTGCTCTCCCTCCA | 697. | GGGCCGGGAAAGAGTTGCTG | 1008. | DMSO | | | |
| | TTGGAGTGTGGCCCGGGTTG | 698. | ACCTCTCTTTCTCTGCCTCACTGT | 1009. | DMSO | 0 | 1 | 1 |
| | CACACCATGCTGATCCAGGC | 699. | GCAGTACGGAAGCACGAAGC | 1010. | DMSO | 1 | 1 | 1 |
| | CTCCAGGGCTCGCTGTCCAC | 700. | CTGGGCTCTGCTGGTTCCCC | 1011. | DMSO | 0 | 2 | 1 |
| | CTGTGGTAGCCGTGGCCAGG | 701. | CCCCATACCACCTCTCCGGGA | 1012. | DMSO | 0 | 2 | 1 |
| | GGTGGCGGGACTTGAATGAG | 702. | CCAGCGTGTTTCCAAGGGAT | 1013. | 1M betaine, | 0 | 1 | 2 |
| | | | | | TD | | | |
| GGAATCCCCTCTCCAGCC | CCAGAGGTGGGGCCCTGTGA | 703. | TTTCCACACTCAGTTCTGCAGGA | 1014. | DMSO | 1 | 1 | 1/2 |
| CCTGG | | | | | | | | |
| GGAATCCCCTCTCCAGCC | | | | | | | | |
| TCTGG | | | | | | | | |
| (SEQ ID NO: 432) | | | | | | | | |
| GGAATCTCTTCCTTGGCA | TGTGACTGGTTGTCCTGCTTTCCT | 704. | GCAGTGTTTTGTGGTGATGGGCA | 1015. | 1M betaine | 0 | 1 | 5 |
| TCTGG | | | | | TD | | | |
| (SEQ ID NO: 433) | | | | | | | | |
| | CTGGCCAAGGGGTGAGTGGG | 705. | TGGGACCCCAGCAGCCAATG | 1016. | DMSO | 1 | 0 | 2 |
| | ACGGTGTGCTGGCTGCTCTT | 706. | ACAGTGCTGACCGTGCTGGG | 1017. | DMSO | 1 | 1 | 1 |
| | TGGTTTGGGCCTCAGGGATGG | 707. | TGCCTCCCACAAAAATGTCTACCT | 1018. | DMSO | 0 | 0 | 3 |
| | TGGTTTGGGCCTCAGGGATGG | 708. | ACCCCTTATCCCAGAACCCATGA | 1019. | DMSO | 0 | 0 | 3 |
| | TCCAAGTCAGCGATGAGGGCT | 709. | TGGGAGCTGTTCCTTTTTGGCCA | 1020. | DMSO | 0 | 3 | 0 |
| | CACCCCTCTCAGCTTCCCAA | 710. | GCTAGAGGGTCTGCTGCCTT | 1021. | DMSO | 1 | 2 | 0 |
| | AGACCCCTTGGCCAAGCACA | 711. | CTTGCTCTCACCCCGCCTCC | 1022. | DMSO | 2 | 1 | 0 |
| | ACATGTGGGAGGCGGACAGA | 712. | TCTCACTTTGCTGTTACCGATGTC | 1023. | DMSO | 0 | 1 | 3 |
| | | | G | | | | | |
| | GGACGACTGTGCCTGGGACA | 713. | AGTGCCCAGAGTGTTGTAACTGC | 1024. | 72 C. Anneal | 0 | 1 | 3 |
| | | | T | | 3% DMSO, | | | |
| | GGAGAGCTCAGCGCCAGGTC | 714. | CAGCGTGGCCCGTGGGAATA | 1025. | DMSO | 1 | 1 | 2 |
| | GCTGAAGTGCTCTGGGGTGCT | 715. | ACCCCACTGTGGATGAATTGGTA | 1026. | DMSO | 1 | 1 | 2 |
| | | | CC | | | | | |
| | TCGGGGTGCACATGGCCATC | 716. | TTGCCTCGCAGGGGAAGCAG | 1027. | DMSO | 0 | 1 | 3 |
| | CTCGTGGGAGGCCAACACCT | 717. | AGCCACCAACACATACCAGGCT | 1028. | DMSO | 2 | 0 | 2 |
| | GCATGCCTTTAATCCCGGCT | 718. | AGGATTTCAGAGTGATGGGGCT | 1029. | DMSO | 2 | 1 | 1 |
| | CGCCCAGCCACAAAGTGCAT | 719. | GCAAATTTCTGCACCTACTCTAGG | 1030. | DMSO | 1 | 1 | 2 |
| | | | CCT | | | | | |
| | AGCTCACAAGAATTGGAGGTAACAGT | 720. | GCAGTCACCCTTCACTGCCTGT | 1031. | DMSO | 1 | 1 | 2 |
| | AAACTGGGCTGGGCTTCCGG | 721. | GGGGCTAAGGCATTGTCAGACCC | 1032. | DMSO | 2 | 0 | 2 |
| | GCAGGTAGGCAGTCTGGGGC | 722. | TCTCCTGCCTCAGCCTCCCA | 1033. | 1M betaine, | 1 | 2 | 1 |
| | | | | | TD | | | |
| | GCAGGTAGGCAGTCTGGGGC | 723. | TCTCCTGCCTCAGCCTCCCA | 1034. | 1M betaine, | 1 | 2 | 1 |
| | | | | | TD | | | |
| | GCAGGTAGGCAGTCTGGGGC | 724. | TCTCCTGCCTCAGCCTCCCA | 1035. | 1M betaine, | 1 | 2 | 1 |
| | | | | | TD | | | |
| | GCTCTGGGGTAGAAGGAGGC | 725. | GGCCTGTCAACCAACCAACC | 1036. | DMSO | 2 | 2 | 0 |
| | TGACATGTTGTGTGCTGGGC | 726. | AAATCCTGCAGCCTCCCCTT | 1037. | DMSO | 0 | 2 | 2 |
| | TCCTGGTGAGATCGTCCACAGGA | 727. | TCCTCCCCACTCAGCCTCCC | 1038. | DMSO | 0 | 3 | 1 |
| | TCCTAATCCAAGTCCTTTGTTCAGACA | 728. | AGGGACCAGCCACTACCCTTCA | 1039. | DMSO | 2 | 2 | 0 |
| | GGGACACCAGTTCCTTCCAT | 729. | GGGGGAGATTGGAGTTCCCC | 1040. | DMSO | 1 | 0 | 4 |
| | ACACCACTATCAAGGCAGAGTAGGT | 730. | TCTGCCTGGGGTGCTTTCCC | 1041. | DMSO | 1 | 1 | 3 |
| | CTGGGAGCGGAGGGAAGTGC | 731. | GCCCCGACAGATGAGGCCTC | 1042. | DMSO | 1 | 2 | 2 |
| CAGATTACTGCTGCAGCA | CGGGTCTCGGAATGCCTCCA | 732. | ACCCAGGAATTGCCACCCCC | 1043. | DMSO | 1 | 2 | 3 |
| CCGGG | | | | | | | | |
| (SEQ ID NO: 434) | | | | | | | | |
| | TTGCTGTGGTCCCGGTGGTG | 733. | GCAGACACTAGAGCCCGCCC | 1044. | DMSO | 3 | 2 | 0 |
| | GGTGTGGTGACAGGTCGGGT | 734. | ACCTGCGTCTCTGTGCTGCA | 1045. | DMSO | 2 | 3 | 0 |
| | CTCCCAGGACAGTGCTCGGC | 735. | CCTGGCCCCATGCTGCCTG | 1046. | DMSO | 2 | 2 | 1 |
| | TGCGTAGGTTTTGCCTCTGTGA | 736. | AGGGAATGATGTTTTCCACCCCCT | 1047. | DMSO | 2 | 3 | 0 |
| | CTCCGCAGCCACCGTTGGTA | 737. | TGCATTGACGTACGATGGCTCA | 1048. | DMSO | 1 | 3 | 1 |
| | ACCTGCAGCATGAACTCTCGCA | 738. | ACCTGAGCAACATGACTCACCTG | 1049. | DMSO | 2 | 1 | 2 |
| | | | G | | | | | |
| ACACAAACTTCTGCAGCA | TCTCCAGTTTCTTGCTCTCATGG | 739. | ACCATTGGTGAACCCAGTCA | 1050. | 1M betaine, | 3/2 | 3 | 1 |
| CCTGG | | | | | TD | | | |
| ACACAAACTTCTGCAGCA | | | | | | | | |
| CGTGG | | | | | | | | |
| (SEQ ID NO: 435) | | | | | | | | |
| | TGGGGTGGTGGTCTTGAATCCA | 740. | TCAGCTATAACCTGGGACTTGTGC | 1051. | DMSO | 2 | 1 | 3 |
| | | | T | | | | | |
| | AGCAGCCAGTCCAGTGTCCTG | 741. | CCCTTTCATCGAGAACCCCAGGG | 1052. | DMSO | 3 | 1 | 2 |
| | TGGACGCTGCTGGGAGGAGA | 742. | GAGGTCTCGGGCTGCTCGTG | 1053. | DMSO | 0 | 3 | 3 |
| | AGGTTTGCACTCTGTTGCCTGG | 743. | TGGGGTGATTGGTTGCCAGGT | 1054. | DMSO | 3 | 2 | 1 |
| | TCTTCCTTTGCCAGGCAGCACA | 744. | TGCAGGAATAGCAGGTATGAGGA | 1055. | DMSO | 4 | 0 | 2 |
| | | | GT | | | | | |
| | GGACGCCTACTGCCTGGACC | 745. | GCCCTGGCAGCCCATGGTAC | 1056. | DMSO | 3 | 0 | 3 |
| | AGGCAGTCATCGCCTTGCTA | 746. | GGTCCCACCTTCCCCTACAA | 1057. | DMSO | 2 | 3 | 1 |
| | Not optimized | | | | | 3 | 1 | 2 |
| | CCCCAGCCCCCACCAGTTTC | 747. | CAGCCCAGGCCACAGCTTCA | 1058. | DMSO | 1 | 4 | 1 |

Sequences and characteristics of genomic on- and off-target sites for six RGNs targeted to endogenous human genes and primers and PCR conditions used to amplify these sites.

[0144] Determination of RGN-Induced On- and Off-Target Mutation Frequencies in Human Cells

[0145] For U2OS.EGFP and K562 cells, 2×10⁵ cells were transfected with 250 ng of gRNA expression plasmid or an empty U6 promoter plasmid (for negative controls), 750 ng of Cas9 expression plasmid, and 30 ng of td-Tomato expression plasmid using the 4D Nucleofector System according to the manufacturer's instructions (Lonza). For HEK293 cells, 1.65×10⁵ cells were transfected with 125 ng of gRNA expression plasmid or an empty U6 promoter plasmid (for the negative control), 375 ng of Cas9 expression plasmid, and 30 ng of a td-Tomato expression plasmid using Lipofectamine LTX reagent according to the manufacturer's instructions (Life Technologies). Genomic DNA was harvested from transfected U2OS.EGFP, HEK293, or K562 cells using the QIAamp DNA Blood Mini Kit (QIAGEN), according to the manufacturer's instructions. To generate enough genomic DNA to amplify the off-target candidate sites, DNA from three Nucleofections (for U2OS.EGFP cells), two Nucleofections (for K562 cells), or two Lipofectamine LTX transfections was pooled together before performing T7EI. This was done twice for each condition tested, thereby generating duplicate pools of genomic DNA representing a total of four or six individual transfections. PCR was then performed using these genomic DNAs as templates as described above and purified using Ampure XP beads (Agencourt) according to the manufacturer's instructions. T7EI assays were performed as previously described (Reyon et al., 2012, supra).

[0146] DNA Sequencing of NHEJ-Mediated Indel Mutations

[0147] Purified PCR products used for the T7EI assay were cloned into Zero Blunt TOPO vector (Life Technologies) and plasmid DNAs were isolated using an alkaline lysis miniprep method by the MGH DNA Automation Core. Plasmids were sequenced using an M13 forward primer (5′-GTAAAACGACGGCCAG-3′ (SEQ ID NO:1059) by the Sanger method (MGH DNA Sequencing Core).

### Example 1a. Single Nucleotide Mismatches

[0148] To begin to define the specificity determinants of RGNs in human cells, a large-scale test was performed to assess the effects of systematically mismatching various positions within multiple gRNA/target DNA interfaces. To do this, a quantitative human cell-based enhanced green fluorescent protein (EGFP) disruption assay previously described (see Methods above and Reyon et al., 2012, supra) that enables rapid quantitation of targeted nuclease activities (FIG. 2B) was used. In this assay, the activities of nucleases targeted to a single integrated EGFP reporter gene can be quantified by assessing loss of fluorescence signal in human U2OS.EGFP cells caused by inactivating frameshift insertion/deletion (indel) mutations introduced by error prone non-homologous end-joining (NHEJ) repair of nuclease-induced double-stranded breaks (DSBs) (FIG. 2B). For the studies described here, three ˜100 nt single gRNAs targeted to different sequences within EGFP were used, as follows:

EGFP Site 1
(SEQ ID NO: 9)
GGGCACGGGCAGCTTGCCGGTGG
EGFP Site 2
(SEQ ID NO: 10)
GATGCCGTTCTTCTGCTTGTCGG
EGFP Site 3
(SEQ ID NO: 11)
GGTGGTGCAGATGAACTTCAGGG

[0149] Each of these gRNAs can efficiently direct Cas9-mediated disruption of EGFP expression (see Example 1e and 2a, and FIG. 3E (top) and 3F (top)).

[0150] In initial experiments, the effects of single nucleotide mismatches at 19 of 20 nucleotides in the complementary targeting region of three EGFP-targeted gRNAs were tested. To do this, variant gRNAs were generated for each of the three target sites harboring Watson-Crick transversion mismatches at positions 1 through 19 (numbered 1 to 20 in the 3′ to 5′ direction; see FIG. 1) and the abilities of these various gRNAs to direct Cas9-mediated EGFP disruption in human cells tested (variant gRNAs bearing a substitution at position 20 were not generated because this nucleotide is part of the U6 promoter sequence and therefore must remain a guanine to avoid affecting expression.)

[0151] For EGFP target site #2, single mismatches in positions 1-10 of the gRNA have dramatic effects on associated Cas9 activity (FIG. 2C, middle panel), consistent with previous studies that suggest mismatches at the 5′ end of gRNAs are better tolerated than those at the 3′ end (Jiang et al., Nat Biotechnol 31, 233-239 (2013); Cong et al., Science 339, 819-823 (2013); Jinek et al., Science 337, 816-821 (2012)). However, with EGFP target sites #1 and #3, single mismatches at all but a few positions in the gRNA appear to be well tolerated, even within the 3′ end of the sequence. Furthermore, the specific positions that were sensitive to mismatch differed for these two targets (FIG. 2C, compare top and bottom panels)—for example, target site #1 was particularly sensitive to a mismatch at position 2 whereas target site #3 was most sensitive to mismatches at positions 1 and 8.

### Example 1b. Multiple Mismatches

[0152] To test the effects of more than one mismatch at the gRNA/DNA interface, a series of variant gRNAs bearing double Watson-Crick transversion mismatches in adjacent and separated positions were created and the abilities of these gRNAs to direct Cas9 nuclease activity were tested in human cells using the EGFP disruption assay. All three target sites generally showed greater sensitivity to double alterations in which one or both mismatches occur within the 3′ half of the gRNA targeting region. However, the magnitude of these effects exhibited site-specific variation, with target site #2 showing the greatest sensitivity to these double mismatches and target site #1 generally showing the least. To test the number of adjacent mismatches that can be tolerated, variant gRNAs were constructed bearing increasing numbers of mismatched positions ranging from positions 19 to 15 in the 5′ end of the gRNA targeting region (where single and double mismatches appeared to be better tolerated).

[0153] Testing of these increasingly mismatched gRNAs revealed that for all three target sites, the introduction of three or more adjacent mismatches results in significant loss of RGN activity. A sudden drop off in activity occurred for three different EGFP-targeted gRNAs as one makes progressive mismatches starting from position 19 in the 5′ end and adding more mismatches moving toward the 3′ end. Specifically, gRNAs containing mismatches at positions 19 and 19+18 show essentially full activity whereas those with mismatches at positions 19+18+17, 19+18+17+16, and 19+18+17+16+15 show essentially no difference relative to a negative control (FIG. 2F). (Note that we did not mismatch position 20 in these variant gRNAs because this position needs to remain as a G because it is part of the U6 promoter that drives expression of the gRNA.)

[0154] Additional proof of that shortening gRNA complementarity might lead to RGNs with greater specificities was obtained in the following experiment: for four different EGFP-targeted gRNAs (FIG. 2H), introduction of a double mismatch at positions 18 and 19 did not significantly impact activity. However, introduction of another double mismatch at positions 10 and 11 then into these gRNAs results in near complete loss of activity. Interestingly introduction of only the 10/11 double mismatches does not generally have as great an impact on activity.

[0155] Taken together, these results in human cells confirm that the activities of RGNs can be more sensitive to mismatches in the 3′ half of the gRNA targeting sequence. However, the data also clearly reveal that the specificity of RGNs is complex and target site-dependent, with single and double mismatches often well tolerated even when one or more mismatches occur in the 3′ half of the gRNA targeting region. Furthermore, these data also suggest that not all mismatches in the half of the gRNA/DNA interface are necessarily well tolerated.

[0156] In addition, these results strongly suggest that gRNAs bearing shorter regions of complementarity (specifically −17 nts) will be more specific in their activities. We note that 17 nts of specificity combined with the 2 nts of specificity conferred by the PAM sequence results in specification of a 19 bp sequence, one of sufficient length to be unique in large complex genomes such as those found in human cells.

### Example 1c. Off-Target Mutations

[0157] To determine whether off-target mutations for RGNs targeted to endogenous human genes could be identified, six single gRNAs that target three different sites in the VEGFA gene, one in the EMX1 gene, one in the RNF2 gene, and one in the FANCF gene were used (Table 1 and Table A). These six gRNAs efficiently directed Cas9-mediated indels at their respective endogenous loci in human U2OS.EGFP cells as detected by T7 Endonuclease I (T7EI) assay (Methods above and Table 1). For each of these six RGNs, we then examined dozens of potential off-target sites (ranging in number from 46 to as many as 64) for evidence of nuclease-induced NHEJ-mediated indel mutations in U2OS.EGFP cells. The loci assessed included all genomic sites that differ by one or two nucleotides as well as subsets of genomic sites that differ by three to six nucleotides and with a bias toward those that had one or more of these mismatches in the 5′ half of the gRNA targeting sequence (Table B). Using the T7EI assay, four off-target sites (out of 53 candidate sites examined) for VEGFA site 1, twelve (out of 46 examined) for VEGFA site 2, seven (out of 64 examined) for VEGFA site 3 and one (out of 46 examined) for the EMX1 site (Table 1 and Table B) were readily identified. No off-target mutations were detected among the 43 and 50 potential sites examined for the RNF2 or FANCF genes, respectively (Table B). The rates of mutation at verified off-target sites were very high, ranging from 5.6% to 125% (mean of 40%) of the rate observed at the intended target site (Table 1). These bona fide off-targets included sequences with mismatches in the 3′ end of the target site and with as many as a total of five mismatches, with most off-target sites occurring within protein coding genes (Table 1). DNA sequencing of a subset of off-target sites provided additional molecular confirmation that indel mutations occur at the expected RGN cleavage site (FIGS. 8A-C).

TABLE 1
On- and off-target mutations induced by RGNs
designed to endogenous human genes

| | | | SEQ | | | | |
|---|---|---|---|---|---|---|---|
| | Site | | ID | Indel Mutation Frequency (%) ±SEM | | | |
| Target | name | Sequence | NO: | U2OS.EGFP | HEK293 | K562 | Gene |
| Target 1 | T1 | GGGTGGGGGGAGTTTGCTCCTGG | 1059. | 26.0 ± 2.9 | 10.5 ± 0.07 | 3.33 ± 0.42 | VEGFA |
| (VEGFA | OT1-3 | GGATGGAGGGAGTTTGCTCCTGG | 1060. | 25.7 ± 9.1 | 18.9 ± 0.77 | 2.93 ± 0.04 | IGDCC3 |
| Site 1) | OT1-4 | GGGAGGGTGGAGTTTGCTCCTGG | 1061. | 9.2 ± 0.8 | 8.32 ± 0.51 | N.D. | LOC116437 |
| | OT1-6 | CGGGGGAGGGAGTTTGCTCCTGG | 1062. | 5.3 ± 0.2 | 3.67 ± 0.09 | N.D. | CACNA2D |
| | OT1-11 | GGGGAGGGGAAGTTTGCTCCTGG | 1063. | 17.1 ± 4.7 | 8.54 ± 0.16 | N.D. | |
| Target 2 | T2 | GACCCCCTCCACCCCGCCTCCGG | 1064. | 50.2 ± 4.9 | 38.6 ± 1.92 | 15.0 ± 0.25 | VEGFA |
| (VEGFA | OT2-1 | GACCCCCCCCACCCCGCCCCCGG | 1065. | 14.4 ± 3.4 | 33.6 ± 1.17 | 4.10 ± 0.05 | FMN1 |
| Site 2) | OT2-2 | GGGCCCCTCCACCCCGCCTCTGG | 1066. | 20.0 ± 6.2 | 15.6 ± 0.30 | 3.00 ± 0.06 | PAX6 |
| | OT2-6 | CTACCCCTCCACCCCGCCTCCGG | 1067. | 8.2 ± 1.4 | 15.0 ± 0.64 | 5.24 ± 0.22 | PAPD7 |
| | OT2-9 | GCCCCCACCCACCCCGCCTCTGG | 1068. | 50.7 ± 5.6 | 30.7 ± 1.44 | 7.05 ± 0.48 | LAMA3 |
| | OT2-15 | TACCCCCCACACCCCGCCTCTGG | 1069. | 9.7 ± 4.5 | 6.97 ± 0.10 | 1.34 ± 0.15 | SPNS3 |
| | OT2-17 | ACACCCCCCCACCCCGCCTCAGG | 1070. | 14.0 ± 2.8 | 12.3 ± 0.45 | 1.80 ± 0.03 | |
| | OT2-19 | ATTCCCCCCCACCCCGCCTCAGG | 1071. | 17.0 ± 3.3 | 19.4 ± 1.35 | N.D. | HDLBP |
| | OT2-20 | CCCCACCCCCACCCCGCCTCAGG | 1072. | 6.1 ± 1.3 | N.D. | N.D. | ABLIM1 |
| | OT2-23 | CGCCCTCCCCACCCCGCCTCCGG | 1073. | 44.4 ± 6.7 | 28.7 ± 1.15 | 4.18 ± 0.37 | CALY |
| | OT2-24 | CTCCCCACCCACCCCGCCTCAGG | 1074. | 62.8 ± 5.0 | 29.8 ± 1.08 | 21.1 ± 1.68 | |
| | OT2-29 | TGCCCCTCCCACCCCGCCTCTGG | 1075. | 13.8 ± 5.2 | N.D. | N.D. | ACLY |
| | OT2-34 | AGGCCCCCACACCCCGCCTCAGG | 1076. | 2.8 ± 1.5 | N.D. | N.D. | |
| Target 3 | T3 | GGTGAGTGAGTGTGTGCGTGTGG | 1077. | 49.4 ± 3.8 | 35.7 ± 1.26 | 27.9 ± 0.52 | VEGFA |
| (VEGFA | OT3-1 | GGTGAGTGAGTGTGTGTGTGAGG | 1078. | 7.4 ± 3.4 | 8.97 ± 0.80 | N.D. | (abParts) |
| Site 3) | OT3-2 | AGTGAGTGAGTGTGTGTGTGGGG | 1079. | 24.3 ± 9.2 | 23.9 ± 0.08 | 8.9 ± 0.16 | MAX |
| | OT3-4 | GCTGAGTGAGTGTATGCGTGTGG | 1080. | 20.9 ± 11.8 | 11.2 ± 0.23 | N.D. | |
| | OT3-9 | GGTGAGTGAGTGCGTGCGGGTGG | 1081. | 3.2 ± 0.3 | 2.34 ± 0.21 | N.D. | TPCN2 |
| | OT3-17 | GTTGAGTGAATGTGTGCGTGAGG | 1082. | 2.9 ± 0.2 | 1.27 ± 0.02 | N.D. | SLIT1 |
| | OT3-18 | TGTGGGTGAGTGTGTGCGTGAGG | 1083. | 13.4 ± 4.2 | 12.1 ± 0.24 | 2.42 ± 0.07 | COMDA |
| | OT3-20 | AGAGAGTGAGTGTGTGCATGAGG | 1084. | 16.7 ± 3.5 | 7.64 ± 0.05 | 1.18 ± 0.01 | |
| Target 4 | T4 | GAGTCCGAGCAGAAGAAGAAGGG | 1085. | 42.1 ± 0.4 | 26.0 ± 0.70 | 10.7 ± 0.50 | EMX1 |
| (EMX1) | OT4-1 | GAGTTAGAGCAGAAGAAGAAAGG | 1086. | 16.8 ± 0.2 | 8.43 ± 1.32 | 2.54 ± 0.02 | HCN1 |
| Target 5 | T5 | GTCATCTTAGTCATTACCTGTGG | 1087. | 26.6 ± 6.0 | — | — | RNF2 |
| (RNF2) | | | | | | | |
| Target 6 | T6 | GGAATCCCTTCTGCAGCACCAGG | 1088. | 33.2 ± 6.5 | — | — | FANCF |
| (FANCF) | | | | | | | |

″OT″ indicates off-target sites (with numbering of sites as in Table E).
Mismatches from the on- target (within the 20 bp region to which the gRNA hybridizes) are highlighted as bold, underlined text.
Mean indel mutation frequencies in U2OS.EGFP, HEK293, and K562 cells were determined as described in Methods.
Genes in which sites were located (if any) are shown.
All sites listed failed to show any evidence of modification in cells transfected with Cas9 expression plasmid and a control U6 promoter plasmid that did not express a functional gRNA.
N.D. = none detected; — = not tested.

### Example 1d. Off-Target Mutations in Other Cell Types

[0158] Having established that RGNs can induce off-target mutations with high frequencies in U2OS.EGFP cells, we next sought to determine whether these nucleases would also have these effects in other types of human cells. We had chosen U2OS.EGFP cells for our initial experiments because we previously used these cells to evaluate the activities of TALENs 15 but human HEK293 and K562 cells have been more widely used to test the activities of targeted nucleases. Therefore, we also assessed the activities of the four RGNs targeted to VEGFA sites 1, 2, and 3 and the EMX1 site in HEK293 and K562 cells. We found that each of these four RGNs efficiently induced NHEJ-mediated indel mutations at their intended on-target site in these two additional human cell lines (as assessed by T7EI assay) (Table 1), albeit with somewhat lower mutation frequencies than those observed in U2OS.EGFP cells. Assessment of the 24 off-target sites for these four RGNs originally identified in U2OS.EGFP cells revealed that many were again mutated in HEK293 and K562 cells with frequencies similar to those at their corresponding on-target site (Table 1). As expected, DNA sequencing of a subset of these off-target sites from HEK293 cells provided additional molecular evidence that alterations are occurring at the expected genomic loci (FIGS. 9A-C). We do not know for certain why in HEK293 cells four and in K562 cells eleven of the off-target sites identified in U2OS.EGFP cells did not show detectable mutations. However, we note that many of these off-target sites also showed relatively lower mutation frequencies in U2OS.EGFP cells. Therefore, we speculate that mutation rates of these sites in HEK293 and K562 cells may be falling below the reliable detection limit of our T7EI assay (˜2-5%) because RGNs generally appear to have lower activities in HEK293 and K562 cells compared with U2OS.EGFP cells in our experiments. Taken together, our results in HEK293 and K562 cells provide evidence that the high-frequency off-target mutations we observe with RGNs will be a general phenomenon seen in multiple human cell types.

### Example 1e. Titration of gRNA- and Cas9-Expressing Plasmid Amounts Used for the EGFP Disruption Assay

[0159] Single gRNAs were generated for three different sequences (EGFP SITES 1-3, shown above) located upstream of EGFP nucleotide 502, a position at which the introduction of frameshift mutations via non-homologous end-joining can robustly disrupt expression of EGFP (Maeder, M. L. et al., Mol Cell 31, 294-301 (2008); Reyon, D. et al., Nat Biotech 30, 460-465 (2012)).

[0160] For each of the three target sites, a range of gRNA-expressing plasmid amounts (12.5 to 250 ng) was initially transfected together with 750 ng of a plasmid expressing a codon-optimized version of the Cas9 nuclease into our U2OS.EGFP reporter cells bearing a single copy, constitutively expressed EGFP-PEST reporter gene. All three RGNs efficiently disrupted EGFP expression at the highest concentration of gRNA-encoding plasmid (250 ng) (FIG. 3E (top)). However, RGNs for target sites #1 and #3 exhibited equivalent levels of disruption when lower amounts of gRNA-expressing plasmid were transfected whereas RGN activity at target site #2 dropped immediately when the amount of gRNA-expressing plasmid transfected was decreased (FIG. 3E(top)).

[0161] The amount of Cas9-encoding plasmid (range from 50 ng to 750 ng) transfected into our U2OS.EGFP reporter cells was titrated and EGFP disruption assayed. As shown in FIG. 3F (top), target site #1 tolerated a three-fold decrease in the amount of Cas9-encoding plasmid transfected without substantial loss of EGFP disruption activity. However, the activities of RGNs targeting target sites #2 and #3 decreased immediately with a three-fold reduction in the amount of Cas9 plasmid transfected (FIG. 3F (top)). Based on these results, 25 ng/250 ng, 250 ng/750 ng, and 200 ng/750 ng of gRNA-/Cas9-expressing plasmids were used for EGFP target sites #1, #2, and #3, respectively, for the experiments described in Examples 1a-1d.

[0162] The reasons why some gRNA/Cas9 combinations work better than others in disrupting EGFP expression is not understood, nor is why some of these combinations are more or less sensitive to the amount of plasmids used for transfection. Although it is possible that the range of off-target sites present in the genome for these three gRNAs might influence each of their activities, no differences were seen in the numbers of genomic sites that differ by one to six bps for each of these particular target sites (Table C) that would account for the differential behavior of the three gRNAs.

TABLE C
Numbers of off-target sites in the human genome
for six RGNs targeted to endogenous human
genes and three RGNs targeted to the EGFP reporter gene

| | Number of mismatches to on-target site | | | | | | |
|---|---|---|---|---|---|---|---|
| Target Site | 0 | 1 | 2 | 3 | 4 | 5 | 6 |
| Target 1 | 1 | 1 | 4 | 32 | 280 | 2175 | 13873 |
| (VEGFA Site 1) | | | | | | | |
| Target 2 | 1 | 0 | 2 | 35 | 443 | 3889 | 17398 |
| (VEGFA Site 2) | | | | | | | |
| Target 3 | 1 | 1 | 17 | 377 | 6028 | 13398 | 35517 |
| (VEGFA Site 3) | | | | | | | |
| Target 4 (EMX) | 1 | 0 | 1 | 18 | 276 | 2309 | 15731 |
| Target 5 (RNF2) | 1 | 0 | 0 | 6 | 116 | 976 | 7443 |
| Target 6 (FANCF) | 1 | 0 | 1 | 18 | 271 | 1467 | 9551 |
| EGFP Target Site #1 | 0 | 0 | 3 | 10 | 156 | 1365 | 9755 |
| EGFP Target Site #2 | 0 | 0 | 0 | 11 | 96 | 974 | 7353 |
| EGFP Target Site #3 | 0 | 0 | 1 | 14 | 165 | 1439 | 10361 |

Off-target sites for each of the six RGNs targeted to the VEGFA, RNF2, FANCF, and EMX1 genes and the three RGNs targeted to EGFP Target Sites #1, #2 and #3 were identified in human genome sequence build GRCh37. Mismatches were only allowed for the 20 nt region to which the gRNA anneals and not to the PAM sequence.

### Example 2: Shortening gRNA Complementarity Length to Improve RGN Cleavage Specificity

[0163] It was hypothesized that off-target effects of RGNs might be minimized without compromising on-target activity simply by decreasing the length of the gRNA-DNA interface, an approach that at first might seem counterintuitive. Longer gRNAs can actually function less efficiently at the on-target site (see below and Hwang et al., 2013a; Ran et al., 2013). In contrast, as shown above in Example 1, gRNAs bearing multiple mismatches at their 5′ ends could still induce robust cleavage of their target sites (FIGS. 2A and 2C-2F), suggesting that these nucleotides might not be required for full on-target activity. Therefore, it was hypothesized that truncated gRNAs lacking these 5′ nucleotides might show activities comparable to full-length gRNAs (FIG. 2A). It was speculated that if the 5′ nucleotides of full-length gRNAs are not needed for on-target activity then their presence might also compensate for mismatches at other positions along the gRNA-target DNA interface. If this were true, it was hypothesized that gRNAs might have greater sensitivity to mismatches and thus might also induce substantially lower levels of Cas9-mediated off-target mutations (FIG. 2A).

[0164] Experimental Procedures

[0165] The following experimental procedures were used in Example 2.

[0166] Plasmid Construction

[0167] All gRNA expression plasmids were assembled by designing, synthesizing, annealing, and cloning pairs of oligonucleotides (IDT) harboring the complementarity region into plasmid pMLM3636 (available from Addgene) as described above (Example 1). The resulting gRNA expression vectors encode a ˜100 nt gRNA whose expression is driven by a human U6 promoter. The sequences of all oligonucleotides used to construct gRNA expression vectors are shown in Table D. The Cas9 D1OA nickase expression plasmid (pJDS271) bearing a mutation in the RuvC endonuclease domain was generated by mutating plasmid pJDS246 using a QuikChange kit (Agilent Technologies) with the following primers: Cas9 D1OA sense primer 5′-tggataaaaagtattctattggtttagccatcggcactaattccg-3′ (SEQ ID NO:1089); Cas9 D10A antisense primer 5′-cggaattagtgccgatggctaaaccaatagaatacititiatcca-3′ (SEQ ID NO:1090). All the targeted gRNA plasmids and the Cas9 nickase plasmids used in this study are available through the non-profit plasmid distribution service Addgene (addgene.org/crispr-cas).

TABLE D
Sequences of oligonucleotides used to construct gRNA expression plasmids
EGFP Target Site 1

| | | | | | | | | | | | | | | | | | | | | | SEQ | | |
|---|---|---|---|---|---|---|---|---|---|---|---|---|---|---|---|---|---|---|---|---|---|---|---|
| | | | | | | | | | | | | | | | | | | | | oligo- | ID | oligo- | |
| 20 | 19 | 18 | 17 | 16 | 15 | 14 | 13 | 12 | 11 | 10 | 9 | 8 | 7 | 6 | 5 | 4 | 3 | 2 | 1 | nucleotide 1 (5′ to 3′) | NO: | nucleotide 2 (5′ to 3′) | SEQ ID NO: |
| | | G | C | A | C | G | G | G | C | A | G | C | T | T | G | C | C | G | G | ACACCGCACGGGCAGCTTGCCGGG | 1091 | AAAACGGGGCAAGCTGCCCGTGCG | 1180. |
| | | G | C | A | C | G | G | G | C | A | G | C | T | T | G | C | C | G | c | ACACCGCACGGGCAGCTTGCCGCG | 1092 | AAAACGCGGCAAGCTGCCCGTGCG | 1181. |
| | | G | C | A | C | G | G | G | C | A | G | C | T | T | G | C | C | c | G | ACACCGCACGGGCAGCTTGCCCGG | 1093 | AAAACCGGGCAAGCTGCCCGTGCG | 1182. |
| | | G | C | A | C | G | G | G | C | A | G | C | T | T | G | C | g | G | G | ACACCGCACGGGCAGCTTGCGGGG | 1094 | AAAACCCCGCAAGCTGCCCGTGCG | 1183. |
| | | G | C | A | C | G | G | G | C | A | G | C | T | T | G | g | C | G | G | ACACCGCACGGGCAGCTTGGCGGG | 1095 | AAAACCCGCCAAGCTGCCCGTGCG | 1184. |
| | | G | C | A | C | G | G | G | C | A | G | C | T | T | c | C | C | G | G | ACACCGCACGGGCAGCTTCCCGGG | 1096 | AAAACCCGGGAAGCTGCCCGTGCG | 1185. |
| | | G | C | A | C | G | G | G | C | A | G | C | T | a | G | C | C | G | G | ACACCGCACGGGCAGCTAGCCGGG | 1097 | AAAACCCGGCTAGCTGCCCGTGCG | 1186. |
| | | G | C | A | C | G | G | G | C | A | G | C | c | T | G | C | C | G | G | ACACCGCACGGGCAGCATGCCGGG | 1098 | AAAACCCGGCATGCTGCCCGTGCG | 1187. |
| | | G | C | A | C | G | G | G | C | A | G | g | T | T | G | C | C | G | G | ACACCGCACGGGCAGGTTGCCGGG | 1099 | AAAACCCGGCAACCTGCCCGTGCG | 1188. |
| | | G | C | A | C | G | G | G | C | A | c | C | T | T | G | C | C | G | G | ACACCGCACGGGCACCTTGCCGGG | 1100 | AAAACCCGGCAAGGTGCCCGTGCG | 1189. |
| | | G | C | A | C | G | G | G | C | t | G | C | T | T | G | C | C | G | G | ACACCGCACGGGCTGCTTGCCGGG | 1101 | AAAACCCGGCAAGCAGCCCGTGCG | 1190. |
| | | G | C | A | C | G | G | G | g | A | G | C | T | T | G | C | C | G | G | ACACCGCACGGGGAGCTTGCCGGG | 1102 | AAAACCCGGCAAGCTCCCCGTGCG | 1191. |
| | | G | C | A | C | G | G | c | C | A | G | C | T | T | G | C | C | G | G | ACACCGCACGGCCAGCTTGCCGGG | 1103 | AAAACCCGGCAAGCTGGCCGTGCG | 1192. |
| | | G | C | A | C | G | c | G | C | A | G | C | T | T | G | C | C | G | G | ACACCGCACGCGCAGCTTGCCGGG | 1104 | AAAACCCGGCAAGCTGCGCGTGCG | 1193. |
| | | G | C | A | C | c | G | G | C | A | G | C | T | T | G | C | C | G | G | ACACCGCACCGGCAGCTTGCCGGG | 1105 | AAAACCCGGCAAGCTGCCGGTGCG | 1194. |
| | | G | C | A | g | G | G | G | C | A | G | C | T | T | G | C | C | G | G | ACACCGCAGGGGCAGCTTGCCGGG | 1106 | AAAACCCGGCAAGCTGCCCCTGCG | 1195. |
| | | G | C | t | C | G | G | G | C | A | G | C | T | T | G | C | C | G | G | ACACCGCTCGGGCAGCTTGCCGGG | 1107 | AAAACCCGGCAAGCTGCCCGAGCG | 1196. |
| | | G | g | A | C | G | G | G | C | A | G | C | T | T | G | C | C | G | G | ACACCGGACGGGCAGCTTGCCGGG | 1108 | AAAACCCGGCAAGCTGCCCGTCCG | 1197. |
| | | G | C | A | C | G | G | G | C | A | G | C | T | T | G | C | C | c | c | ACACCGCACGGGCAGCTTGCCCCG | 1109 | AAAACGGGGCAAGCTGCCCGTGCG | 1198. |
| | | G | C | A | C | G | G | G | C | A | G | C | T | T | G | g | g | G | G | ACACCGCACGGGCAGCTTGGGGGG | 1110 | AAAACCCCCCAAGCTGCCCGTGCG | 1199. |
| | | G | C | A | C | G | G | G | C | A | G | C | T | a | c | C | C | G | G | ACACCGCACGGGCAGCTACCCGGG | 1111 | AAAACCCGGGTAGCTGCCCGTGCG | 1200. |
| | | G | C | A | C | G | G | G | C | A | G | g | a | T | G | C | C | G | G | ACACCGCACGGGCAGGATGCCGGG | 1112 | AAAACCCGGCATCCTGCCCGTGCG | 1201. |
| | | G | C | A | C | G | G | G | C | t | c | C | T | T | G | C | C | G | G | ACACCGCACGGGCTCCTTGCCGGG | 1113 | AAAACCCGGCAAGGAGCCCGTGCG | 1202. |
| | | G | C | A | C | G | G | c | g | A | G | C | T | T | G | C | C | G | G | ACACCGCACGGCGAGCTTGCCGGG | 1114 | AAAACCCGGCAAGCTCGCCGTGCG | 1203. |
| | | G | C | A | C | c | c | G | C | A | G | C | T | T | G | C | C | G | G | ACACCGCACCCGCAGCTTGCCGGG | 1115 | AAAACCCGGCAAGCTGCGGGTGCG | 1204. |
| | | G | C | A | g | G | G | G | C | A | G | C | T | T | G | C | C | G | G | ACACCGCTGGGGCAGCTTGCCGGG | 1116 | AAAACCCGGCAAGCTGCCCCAGCG | 1205. |
| | | g | t | A | C | G | G | G | C | A | G | C | T | T | G | C | C | G | G | ACACCGGTCGGGCAGCTTGCCGGG | 1117 | AAAACCCGGCAAGCTGCCCGACCG | 1206. |

EGFP Target Site 2

| | | | | | | | | | | | | | | | | | | | | | SEQ | | |
|---|---|---|---|---|---|---|---|---|---|---|---|---|---|---|---|---|---|---|---|---|---|---|---|
| | | | | | | | | | | | | | | | | | | | | oligo- | ID | oligo- | |
| 20 | 19 | 18 | 17 | 16 | 15 | 14 | 13 | 12 | 11 | 10 | 9 | 8 | 7 | 6 | 5 | 4 | 3 | 2 | 1 | nucleotide 1 (5′ to 3′) | NO: | nucleotide 2 (5′ to 3′) | |
| | | | G | C | C | G | T | T | C | T | T | C | T | G | C | T | T | G | T | ACACCGCCGTTCTTCTGCTTGTG | 1118 | AAAACACAAGCAGAAGAACGGCG | 1207. |
| | | | G | C | C | G | T | T | C | T | T | C | T | G | C | T | T | G | A | ACACCGCCGTTCTTCTGCTTGAG | 1119 | AAAACTCAAGCAGAAGAACGGCG | 1208. |
| | | | G | C | C | G | T | T | C | T | T | C | T | G | C | T | T | c | T | ACACCGCCGTTCTTCTGCTTCTG | 1120 | AAAACAGAAGCAGAAGAACGGCG | 1209. |
| | | | G | C | C | G | T | T | C | T | T | C | T | G | C | T | a | G | T | ACACCGCCGTTCTTCTGCTAGTG | 1121 | AAAACACTAGCAGAAGAACGGCG | 1210. |
| | | | G | C | C | G | T | T | C | T | T | C | T | G | C | a | T | G | T | ACACCGCCGTTCTTCTGCATGTG | 1122 | AAAACACATGCAGAAGAACGGCG | 1211. |
| | | | G | C | C | G | T | T | C | T | T | C | T | G | g | T | T | G | T | ACACCGCCGTTCTTCTGGTTGTG | 1123 | AAAACACAACCAGAAGAACGGCG | 1212. |
| | | | G | C | C | G | T | T | C | T | T | C | T | c | C | T | T | G | T | ACACCGCCGTTCTTCTCCTTGTG | 1124 | AAAACACAAGGAGAAGAACGGCG | 1213. |
| | | | G | C | C | G | T | T | C | T | T | C | a | G | C | T | T | G | T | ACACCGCCGTTCTTCAGCTTGTG | 1125 | AAAACACAAGCTGAAGAACGGCG | 1214. |
| | | | G | C | C | G | T | T | C | T | T | g | T | G | C | T | T | G | T | ACACCGCCGTTCTTGTGCTTGTG | 1126 | AAAACACAAGCACAAGAACGGCG | 1215. |
| | | | G | C | C | G | T | T | C | T | a | C | T | G | C | T | T | G | T | ACACCGCCGTTCTACTGCTTGTG | 1127 | AAAACACAAGCAGTAGAACGGCG | 1216. |
| | | | G | C | C | G | T | T | C | a | T | C | T | G | C | T | T | G | T | ACACCGCCGTTCATCTGCTTGTG | 1128 | AAAACACAAGCAGATGAACGGCG | 1217. |
| | | | G | C | C | G | T | T | g | T | T | C | T | G | C | T | T | G | T | ACACCGCCGTTGTTCTGCTTGTG | 1129 | AAAACACAAGCAGAACAACGGCG | 1218. |
| | | | G | C | C | G | T | a | C | T | T | C | T | G | C | T | T | G | T | ACACCGCCGTACTTCTGCTTGTG | 1130 | AAAACACAAGCAGAAGTACGGCG | 1219. |
| | | | G | C | C | G | a | T | C | T | T | C | T | G | C | T | T | G | T | ACACCGCCGATCTTCTGCTTGTG | 1131 | AAAACACAAGCAGAAGATCGGCG | 1220. |
| | | | G | C | C | c | T | T | C | T | T | C | T | G | C | T | T | G | T | ACACCGCCCTTCTTCTGCTTGTG | 1132 | AAAACACAAGCAGAAGAAGGGCG | 1221. |
| | | | G | C | g | G | T | T | C | T | T | C | T | G | C | T | T | G | T | ACACCGCGGTTCTTCTGCTTGTG | 1133 | AAAACACAAGCAGAAGAACCGCG | 1222. |
| | | | G | g | C | G | T | T | C | T | T | C | T | G | C | T | T | G | T | ACACCGGCGTTCTTCTGCTTGTG | 1134 | AAAACACAAGCAGAAGAACGCCG | 1223. |
| | | | G | C | C | G | T | T | C | T | T | C | T | G | C | T | T | c | a | ACACCGCCGTTCTTCTGCTTCAG | 1135 | AAAACTGAAGCAGAAGAACGGCG | 1224. |
| | | | G | C | C | G | T | T | C | T | T | C | T | G | C | a | a | G | T | ACACCGCCGTTCTTCTGCAAGTG | 1136 | AAAACACTTGCAGAAGAACGGCG | 1225. |
| | | | G | C | C | G | T | T | C | T | T | C | T | c | g | T | T | G | T | ACACCGCCGTTCTTCTCGTTGTG | 1137 | AAAACACAACGAGAAGAACGGCG | 1226. |
| | | | G | C | C | G | T | T | C | T | T | g | a | G | C | T | T | G | T | ACACCGCCGTTCTTGAGCTTGTG | 1138 | AAAACACAAGCTCAAGAACGGCG | 1227. |
| | | | G | C | C | G | T | T | C | a | a | C | T | G | C | T | T | G | T | ACACCGCCGTTCAACTGCTTGTG | 1139 | AAAACACAAGCAGTTGAACGGCG | 1228. |
| | | | G | C | C | G | T | a | g | T | T | C | T | G | C | T | T | G | T | ACACCGCCGTAGTTCTGCTTGTG | 1140 | AAAACACAAGCAGAACTACGGCG | 1229. |
| | | | G | C | C | c | a | T | C | T | T | C | T | G | C | T | T | G | T | ACACCGCCCATCTTCTGCTTGTG | 1141 | AAAACACAAGCAGAAGATGGGCG | 1230. |
| | | | G | g | g | G | T | T | C | T | T | C | T | G | C | T | T | G | T | ACACCGGGGTTCTTCTGCTTGTG | 1142 | AAAACACAAGCAGAAGAACCCCG | 1231. |

EGFP Target Site 3

| | | | | | | | | | | | | | | | | | | | | | SEQ | | |
|---|---|---|---|---|---|---|---|---|---|---|---|---|---|---|---|---|---|---|---|---|---|---|---|
| | | | | | | | | | | | | | | | | | | | | oligo- | ID | oligo- | |
| 20 | 19 | 18 | 17 | 16 | 15 | 14 | 13 | 12 | 11 | 10 | 9 | 8 | 7 | 6 | 5 | 4 | 3 | 2 | 1 | nucleotide 1 (5′ to 3′) | NO: | nucleotide 2 (5′ to 3′) | |
| | | | G | G | T | G | C | A | G | A | T | G | A | A | C | T | T | C | A | ACACCGGTGCAGATGAACTTCAG | 1143 | AAAACTCTAGTTCATCTGCACCG | 1232. |
| | | | G | G | T | G | C | A | G | A | T | G | A | A | C | T | T | C | t | ACACCGGTGCAGATGAACTTCTG | 1144 | AAAACTCAAGTTCATCTGCACCG | 1233. |
| | | | G | G | T | G | C | A | G | A | T | G | A | A | C | T | T | g | A | ACACCGGTGCAGATGAACTTGAG | 1145 | AAAACTGTAGTTCATCTGCACCG | 1234. |
| | | | G | G | T | G | C | A | G | A | T | G | A | A | C | T | a | C | A | ACACCGGTGCAGATGAACTACAG | 1146 | AAAACTGATGTTCATCTGCACCG | 1235. |
| | | | G | G | T | G | C | A | G | A | T | G | A | A | C | a | T | C | A | ACACCGGTGCAGATGAACATCAG | 1147 | AAAACTGAACTTCATCTGCACCG | 1236. |
| | | | G | G | T | G | C | A | G | A | T | G | A | A | g | T | T | C | A | ACACCGGTGCAGATGAAGTTCAG | 1148 | AAAACTGAAGATCATCTGCACCG | 1237. |
| | | | G | G | T | G | C | A | G | A | T | G | A | t | C | T | T | C | A | ACACCGGTGCAGATGATCTTCAG | 1149 | AAAACTGAAGTACATCTGCACCG | 1238. |
| | | | G | G | T | G | C | A | G | A | T | G | t | A | C | T | T | C | A | ACACCGGTGCAGATGTACTTCAG | 1150 | AAAACTGAAGTTGATCTGCACCG | 1239. |
| | | | G | G | T | G | C | A | G | A | T | c | A | A | C | T | T | C | A | ACACCGGTGCAGATCAACTTCAG | 1151 | AAAACTGAAGTTCTTCTGCACCG | 1240. |
| | | | G | G | T | G | C | A | G | A | a | G | A | A | C | T | T | C | A | ACACCGGTGCAGAAGAACTTCAG | 1152 | AAAACTGAAGTTCAACTGCACCG | 1241. |
| | | | G | G | T | G | C | A | G | t | T | G | A | A | C | T | T | C | A | ACACCGGTGCAGTTGAACTTCAG | 1153 | AAAACTGAAGTTCATGTGCACCG | 1242. |
| | | | G | G | T | G | C | A | c | A | T | G | A | A | C | T | T | C | A | ACACCGGTGCACATGAACTTCAG | 1154 | AAAACTGAAGTTCATCAGCACCG | 1243. |
| | | | G | G | T | G | C | t | G | A | T | G | A | A | C | T | T | C | A | ACACCGGTGCTGATGAACTTCAG | 1155 | AAAACTGAAGTTCATCTCCACCG | 1244. |
| | | | G | G | T | G | g | A | G | A | T | G | A | A | C | T | T | C | A | ACACCGGTGGAGATGAACTTCAG | 1156 | AAAACTGAAGTTCATCTGGACCG | 1245. |
| | | | G | G | T | c | C | A | G | A | T | G | A | A | C | T | T | C | A | ACACCGGTCCAGATGAACTTCAG | 1157 | AAAACTGAAGTTCATCTGCTCCG | 1246. |
| | | | G | G | a | G | C | A | G | A | T | G | A | A | C | T | T | C | A | ACACCGGAGCAGATGAACTTCAG | 1158 | AAAACTGAAGTTCATCTGCAGCG | 1247. |
| | | | G | c | T | G | C | A | G | A | T | G | A | A | C | T | T | C | A | ACACCGCTGCAGATGAACTTCAG | 1159 | AAAACTGAAGTTCATCTGCAGCG | 1248. |
| | | | G | G | T | G | C | A | G | A | T | G | A | A | C | T | T | g | t | ACACCGGTGCAGATGAACTTGTG | 1160 | AAAACACAAGTTCATCTGCACCG | 1249. |
| | | | G | G | T | G | C | A | G | A | T | G | A | A | C | a | a | C | A | ACACCGGTGCAGATGAACAACAG | 1161 | AAAACTGTTGTTCATCTGCACCG | 1250. |
| | | | G | G | T | G | C | A | G | A | T | G | A | g | g | T | T | C | A | ACACCGGTGCAGATGATGTTCAG | 1162 | AAAACTGAACATCATCTGCACCG | 1251. |
| | | | G | G | T | G | C | A | G | A | T | c | t | A | C | T | T | C | A | ACACCGGTGCAGATCTACTTCAG | 1163 | AAAACTGAAGTAGATCTGCACCG | 1252. |
| | | | G | G | T | G | C | A | G | t | a | G | A | A | C | T | T | C | A | ACACCGGTGCAGTAGAACTTCAG | 1164 | AAAACTGAAGTTCTACTGCACCG | 1253. |
| | | | G | G | T | G | C | t | c | A | T | G | A | A | C | T | T | C | A | ACACCGGTGCTCATGAACTTCAG | 1165 | AAAACTGAAGTTCATGAGCACCG | 1254. |
| | | | G | G | T | c | g | A | G | A | T | G | A | A | C | T | T | C | A | ACACCGGTCGAGATGAACTTCAG | 1166 | AAAACTGAAGTTCATCTCGACCG | 1255. |
| | | | G | c | a | G | C | A | G | A | T | G | A | A | C | T | T | C | A | ACACCGCAGCAGATGAACTTCAG | 1167 | AAAACTGAAGTTCATCTGCTGCG | 1256. |

Endogenous Target 1 (VEGFA Site 1 tru-gRNA):

| | | | | | | | | | | | | | | | | | | | | | SEQ | | |
|---|---|---|---|---|---|---|---|---|---|---|---|---|---|---|---|---|---|---|---|---|---|---|---|
| | | | | | | | | | | | | | | | | | | | | oligo- | ID | oligo- | |
| 20 | 19 | 18 | 17 | 16 | 15 | 14 | 13 | 12 | 11 | 10 | 9 | 8 | 7 | 6 | 5 | 4 | 3 | 2 | 1 | nucleotide 1 (5′ to 3′) | NO: | nucleotide 2 (5′ to 3′) | |
| | | G | T | G | G | G | G | G | G | A | G | T | T | T | G | C | T | C | C | ACACCGTGGGGGGACTTTGCTCCG | 1168 | AAAACGGAGCAAACTCCCCCCACG | 1257. |

Endogenous Target 3 (VEGFA Site 3 tru-gRNA):

| | | | | | | | | | | | | | | | | | | | | | SEQ | | |
|---|---|---|---|---|---|---|---|---|---|---|---|---|---|---|---|---|---|---|---|---|---|---|---|
| | | | | | | | | | | | | | | | | | | | | oligo- | ID | oligo- | |
| 20 | 19 | 18 | 17 | 16 | 15 | 14 | 13 | 12 | 11 | 10 | 9 | 8 | 7 | 6 | 5 | 4 | 3 | 2 | 1 | nucleotide 1 (5′ to 3′) | NO: | nucleotide 2 (5′ to 3′) | |
| | | | G | A | G | T | G | A | G | T | G | T | G | T | G | C | G | T | G | ACACCGAGTGAGTGTGTGCGTGG | 1169 | AAAACCACGCACACACTCACTCG | 1258. |

Endogenous Target 4 (EMX1 Site 1 tru-gRNA):

| | | | | | | | | | | | | | | | | | | | | | SEQ | | |
|---|---|---|---|---|---|---|---|---|---|---|---|---|---|---|---|---|---|---|---|---|---|---|---|
| | | | | | | | | | | | | | | | | | | | | oligo- | ID | oligo- | |
| 20 | 19 | 18 | 17 | 16 | 15 | 14 | 13 | 12 | 11 | 10 | 9 | 8 | 7 | 6 | 5 | 4 | 3 | 2 | 1 | nucleotide 1 (5′ to 3′) | NO: | nucleotide 2 (5′ to 3′) | |
| | | G | T | C | C | G | A | G | C | A | G | A | A | G | A | A | G | A | A | ACACCGTCCGAGCAGAAGAAGAAG | 1170 | AAAACTTCTTCTTCTGCTCGGACG | 1259. |

CTLA full-length gRNA

| | | | | | | | | | | | | | | | | | | | | | SEQ | | |
|---|---|---|---|---|---|---|---|---|---|---|---|---|---|---|---|---|---|---|---|---|---|---|---|
| | | | | | | | | | | | | | | | | | | | | oligo- | ID | oligo- | |
| 20 | 19 | 18 | 17 | 16 | 15 | 14 | 13 | 12 | 11 | 10 | 9 | 8 | 7 | 6 | 5 | 4 | 3 | 2 | 1 | nucleotide 1 (5′ to 3′) | NO: | nucleotide 2 (5′ to 3′) | |
| G | C | A | G | A | T | G | T | A | G | T | G | T | T | T | C | C | A | C | A | ACACCGCAGATGTAGTGTTTCCACAG | 1171 | AAAACTGTGGAAACACTACATCTGCG | 1260. |

CTLA thru-gRNA

| | | | | | | | | | | | | | | | | | | | | | SEQ | | |
|---|---|---|---|---|---|---|---|---|---|---|---|---|---|---|---|---|---|---|---|---|---|---|---|
| | | | | | | | | | | | | | | | | | | | | oligo- | ID | oligo- | |
| 20 | 19 | 18 | 17 | 16 | 15 | 14 | 13 | 12 | 11 | 10 | 9 | 8 | 7 | 6 | 5 | 4 | 3 | 2 | 1 | nucleotide 1 (5′ to 3′) | NO: | nucleotide 2 (5′ to 3′) | |
| | | | G | A | T | G | T | A | G | T | G | T | T | T | C | C | A | C | A | ACACCGATGTAGTGTTTCCACAG | 1172 | AAAACTGTGGAAACACTACATCG | 1261. |

VEGFA site 4 full-length gRNA

| | | | | | | | | | | | | | | | | | | | | | SEQ | | |
|---|---|---|---|---|---|---|---|---|---|---|---|---|---|---|---|---|---|---|---|---|---|---|---|
| | | | | | | | | | | | | | | | | | | | | oligo- | ID | oligo- | |
| 20 | 19 | 18 | 17 | 16 | 15 | 14 | 13 | 12 | 11 | 10 | 9 | 8 | 7 | 6 | 5 | 4 | 3 | 2 | 1 | nucleotide 1 (5′ to 3′) | NO: | nucleotide 2 (5′ to 3′) | |
| T | C | C | C | T | C | T | T | T | A | G | C | C | A | G | A | G | C | C | G | ACACCTCCCTCTTTAGCCAGAGCCGG | 1173 | AAAACCGGCTCTGGCCTAAAGGGAG | 1262. |

EMX1 site 2 full-length gRNA

| | | | | | | | | | | | | | | | | | | | | | SEQ | | |
|---|---|---|---|---|---|---|---|---|---|---|---|---|---|---|---|---|---|---|---|---|---|---|---|
| | | | | | | | | | | | | | | | | | | | | oligo- | ID | oligo- | |
| 20 | 19 | 18 | 17 | 16 | 15 | 14 | 13 | 12 | 11 | 10 | 9 | 8 | 7 | 6 | 5 | 4 | 3 | 2 | 1 | nucleotide 1 (5′ to 3′) | NO: | nucleotide 2 (5′ to 3′) | |
| G | C | C | G | T | T | T | G | T | A | C | T | T | T | G | T | C | C | T | C | ACACCGCCGTTTGTACTTTGCCTCG | 1174 | AAAACGAGGACAAAGTACAAACGGCG | 1263. |

EMX1 site 2 tru-gRNA

| | | | | | | | | | | | | | | | | | | | | | SEQ | | |
|---|---|---|---|---|---|---|---|---|---|---|---|---|---|---|---|---|---|---|---|---|---|---|---|
| | | | | | | | | | | | | | | | | | | | | oligo- | ID | oligo- | |
| 20 | 19 | 18 | 17 | 16 | 15 | 14 | 13 | 12 | 11 | 10 | 9 | 8 | 7 | 6 | 5 | 4 | 3 | 2 | 1 | nucleotide 1 (5′ to 3′) | NO: | nucleotide 2 (5′ to 3′) | |
| | | | G | T | T | T | G | T | A | C | T | T | T | G | T | C | C | T | C | ACACCGTTTGTACTTTGTCCTCG | 1175 | AAAACGAGGACAAAGTACAAACG | 1264. |

EMX1 site 3 full-length gRNA

| | | | | | | | | | | | | | | | | | | | | | SEQ | | |
|---|---|---|---|---|---|---|---|---|---|---|---|---|---|---|---|---|---|---|---|---|---|---|---|
| | | | | | | | | | | | | | | | | | | | | oligo- | ID | oligo- | |
| 20 | 19 | 18 | 17 | 16 | 15 | 14 | 13 | 12 | 11 | 10 | 9 | 8 | 7 | 6 | 5 | 4 | 3 | 2 | 1 | nucleotide 1 (5′ to 3′) | NO: | nucleotide 2 (5′ to 3′) | |
| F | F | F | A | A | G | A | C | T | G | A | G | G | C | T | A | C | A | T | A | ACACCGGGAAGACTGAGGCTACATAG | 1176 | AAAACTATGTAGCCTCAGTCTTCCCG | 1265. |

EMX1 site 3 tru-gRNA

| | | | | | | | | | | | | | | | | | | | | | SEQ | | |
|---|---|---|---|---|---|---|---|---|---|---|---|---|---|---|---|---|---|---|---|---|---|---|---|
| | | | | | | | | | | | | | | | | | | | | oligo- | ID | oligo- | |
| 20 | 19 | 18 | 17 | 16 | 15 | 14 | 13 | 12 | 11 | 10 | 9 | 8 | 7 | 6 | 5 | 4 | 3 | 2 | 1 | nucleotide 1 (5′ to 3′) | NO: | nucleotide 2 (5′ to 3′) | |
| | | G | A | A | G | A | C | T | G | A | G | G | C | T | A | C | A | T | A | ACACCGAAGACTGAGGCTACATAG | 1177 | AAAACTATGTAGCCTCAGTCTTCG | 1266. |

EMX1 site 4 full-length gRNA

| | | | | | | | | | | | | | | | | | | | | | SEQ | | |
|---|---|---|---|---|---|---|---|---|---|---|---|---|---|---|---|---|---|---|---|---|---|---|---|
| | | | | | | | | | | | | | | | | | | | | oligo- | ID | oligo- | |
| 20 | 19 | 18 | 17 | 16 | 15 | 14 | 13 | 12 | 11 | 10 | 9 | 8 | 7 | 6 | 5 | 4 | 3 | 2 | 1 | nucleotide 1 (5′ to 3′) | NO: | nucleotide 2 (5′ to 3′) | |
| G | A | G | G | C | C | C | C | C | A | G | A | G | C | A | G | C | C | A | C | ACACCGAGGCCCCCAGAGCAGCCACG | 1178 | AAAACGTGGCTGCTCTGGGGGCCCTCG | 1267. |

EMX1 site 4 tru-gRNA

| | | | | | | | | | | | | | | | | | | | | | SEQ | | |
|---|---|---|---|---|---|---|---|---|---|---|---|---|---|---|---|---|---|---|---|---|---|---|---|
| | | | | | | | | | | | | | | | | | | | | oligo- | ID | oligo- | |
| 20 | 19 | 18 | 17 | 16 | 15 | 14 | 13 | 12 | 11 | 10 | 9 | 8 | 7 | 6 | 5 | 4 | 3 | 2 | 1 | nucleotide 1 (5′ to 3′) | NO: | nucleotide 2 (5′ to 3′) | |
| | | | G | C | C | C | C | C | A | G | A | G | C | A | G | C | C | A | C | ACACCGCCCCCAGAGCAGCCACG | 1179 | AAAACGTGGCTGCTCTGGGGGCG | 1268. |

[0168] Human Cell-Based EGFP Disruption Assay

[0169] U2OS.EGFP cells harboring a single-copy, integrated EGFP-PEST gene reporter have been previously described (Reyon et al., 2012). These cells were maintained in Advanced DMEM (Life Technologies) supplemented with 10% FBS, 2 mM GlutaMax (Life Technologies), penicillin/streptomycin and 400 μg/ml G418. To assay for disruption of EGFP expression, 2×10⁵ U2OS.EGFP cells were transfected in duplicate with gRNA expression plasmid or an empty U6 promoter plasmid as a negative control, Cas9 expression plasmid (pJDS246) (Example 1 and Fu et al., 2013), and 10 ng of td-Tomato expression plasmid (to control for transfection efficiency) using a LONZA 4D-Nucleofector™, with SE solution and DN100 program according to the manufacturer's instructions. We used 25 ng/250 ng, 250 ng/750 ng, 200 ng/750 ng, and 250 ng/750 ng of gRNA expression plasmid/Cas9 expression plasmid for experiments with EGFP site #1, #2, #3, and #4, respectively. Two days following transfection, cells were trypsinized and resuspended in Dulbecco's modified Eagle medium (DMEM, Invitrogen) supplemented with 10% (vol/vol) fetal bovine serum (FBS) and analyzed on a BD LSRII flow cytometer. For each sample, transfections and flow cytometry measurements were performed in duplicate.

[0170] Transfection of Human Cells and Isolation of Genomic DNA

[0171] To assess the on-target and off-target indel mutations induced by RGNs targeted to endogenous human genes, plasmids were transfected into U2OS.EGFP or HEK293 cells using the following conditions: U2OS.EGFP cells were transfected using the same conditions as for the EGFP disruption assay described above. HEK293 cells were transfected by seeding them at a density of 1.65×10⁵ cells per well in 24 well plates in Advanced DMEM (Life Technologies) supplemented with 10% FBS and 2 mM GlutaMax (Life Technologies) at 37° C. in a CO₂ incubator. After 22-24 hours of incubation, cells were transfected with 125 ng of gRNA expression plasmid or an empty U6 promoter plasmid (as a negative control), 375 ng of Cas9 expression plasmid (pJDS246) (Example 1 and Fu et al., 2013), and 10 ng of a td-Tomato expression plasmid, using Lipofectamine LTX reagent according to the manufacturer's instructions (Life Technologies). Medium was changed 16 hours after transfection. For both types of cells, genomic DNA was harvested two days post-transfection using an Agencourt DNAdvance genomic DNA isolation kit (Beckman) according to the manufacturer's instructions. For each RGN sample to be assayed, 12 individual 4D transfection replicates were performed, genomic DNA was isolated from each of these 12 transfections, and then these samples were combined to create two “duplicate” pools each consisting of six pooled genomic DNA samples. Indel mutations were then assessed at on-target and off-target sites from these duplicate samples by T7EI assay, Sanger sequencing, and/or deep sequencing as described below.

[0172] To assess frequencies of precise alterations introduced by HDR with ssODN donor templates, 2×10⁵ U2OS.EGFP cells were transfected 250 ng of gRNA expression plasmid or an empty U6 promoter plasmid (as a negative control), 750 ng Cas9 expression plasmid (pJDS246), 50 pmol of ssODN donor (or no ssODN for controls), and 10 ng of td-Tomato expression plasmid (as the transfection control). Genomic DNA was purified three days after transfection using Agencourt DNAdvance and assayed for the introduction of a BamHI site at the locus of interest as described below. All of these transfections were performed in duplicate.

[0173] For experiments involving Cas9 nickases, 2×10⁵ U2OS.EGFP cells were transfected with 125 ng of each gRNA expression plasmid (if using paired gRNAs) or 250 ng of gRNA expression plasmid (if using a single gRNA), 750 ng of Cas9-D10A nickase expression plasmid (pJDS271), 10 ng of td-Tomato plasmid, and (if performing HDR) 50 pmol of ssODN donor template (encoding the BamHI site). All transfections were performed in duplicate. Genomic DNA harvested two days after transfection (if assaying for indel mutations) or three days after transfection (if assaying for HDR/ssODN-mediated alterations) using the Agencourt DNAdvance genomic DNA isolation kit (Beckman).

[0174] T7EI Assays for Quantifying Frequencies of Indel Mutations

[0175] T7EI assays were performed as previously described (Example 1 and Fu et al., 2013). In brief, PCR reactions to amplify specific on-target or off-target sites were performed with Phusion high-fidelity DNA polymerase (New England Biolabs) using one of the two following programs: (1) Touchdown PCR program [(98° C., 10 s; 72-62° C., −1° C./cycle, 15 s; 72° C., 30 s)×10 cycles, (98° C., 10 s; 62° C., 15 s; 72° C., 30 s)×25 cycles] or (2) Constant Tm PCR program [(98° C., 10 s; 68° C. or 72° C., 15 s; 72° C., 30 s)×35 cycles], with 3% DMSO or 1 M betaine if necessary. All primers used for these amplifications are listed in Table E. Resulting PCR products ranged in size from 300 to 800 bps and were purified by Ampure XP beads (Agencourt) according to the manufacturer's instructions. 200 ng of purified PCR products were hybridized in 1×NEB buffer 2 in a total volume of 19 μl and denatured to form heteroduplexes using the following conditions: 95° C., 5 minutes; 95 to 85° C., −2° C./s; 85 to 25° C., −0.1° C./s; hold at 4° C. 1 μl of T7 Endonuclease I (New England Biolabs, 10 units/μ1) was added to the hybridized PCR products and incubated at 37° C. for 15 minutes. The T7EI reaction was stopped by adding 2 μl of 0.25 M EDTA solution and the reaction products were purified using AMPure XP beads (Agencourt) with elution in 20 μl 0.1×EB buffer (QIAgen). Reactions products were then to analyzed on a QIAXCEL capillary electrophoresis system and the frequencies of indel mutations were calculated using the same formula as previously described (Reyon et al., 2012).

TABLE E

| | | | Mis- | | | | | | | | | |
|---|---|---|---|---|---|---|---|---|---|---|---|---|
| | | | matches | | | | | | | | | |
| | | | in | | | | | | | | non- | |
| | Expected | | target | | | | | | | | Watson- | |
| | Off-Target | | compared | | | | | | | Watson- | Crick | |
| Publi- | Sequenes | SEQ | to on- | Actual Target | Forward | SEQ | Reverse | SEQ | | Crick | Trans | |
| cation | (Expected)- | ID | target | in U2OS.EGFP | PCR | ID | PCR | ID | PCR | Trans- | -ver- | Tran- |
| ID | HS GRCh37 | NO: | site | cells | Primer | NO: | Primer | NO: | Conditions | versions | sions | sitions |
| Target 1 | GGGTGGGGGGAG | 1269. | 0 | | TCCAGATGGCACA | 1270. | AGGGAGCA | 1271. | DMSO | | | |
| | TTTGCTCCTGG | | | | TTGTCAG | | GGAAAGTG | | | | | |
| | | | | | | | AGGT | | | | | |
| OT1-1 | GGGTGGGGGGAG | 1272. | 1 | | GGGGCCCACTCTT | 1273. | ACCCAGAC | 1274. | No | 0 | 0 | 1 |
| | TTTGCCCCAGG | | | | CTTCCAT | | TCCTGGTG | | DMSO | | | |
| | | | | | | | TGGC | | | | | |
| OT1-2 | GCGTGGGGGGTG | 1275. | 2 | | GCTAAGCAGAGAT | 1276. | ACCACCCT | 1277. | DMSO | 2 | 0 | 0 |
| | TTTGCTCCCGG | | | | GCCTATGCC | | TTCCCCCA | | | | | |
| | | | | | | | GAAA | | | | | |
| OT1-3 | GGATGGAGGGAG | 1278. | 2 | | ACCCCACAGCCAG | 1279. | GAATCACT | 1280. | DMSO | 0 | 0 | 2 |
| | TTTGCTCCTGG | | | | GTTTTCA | | GCACCTGG | | | | | |
| | | | | | | | CCATC | | | | | |
| OT1-4 | GGGAGGGTGGAG | 1281. | 2 | | TGCGGCAACTTCA | 1282. | TAAAGGGC | 1283. | DMSO | 1 | 1 | 0 |
| | TTTGCTCCTGG | | | | GACAACC | | GTGCTGGG | | | | | |
| | | | | | | | AGAG | | | | | |
| OT1-5 | GGGTGGGTGGAG | 1284. | 2 | | GCATGTCAGGATC | 1285. | TGCAGGGC | 1286. | DMSO | 0 | 2 | 0 |
| | TTTGCTACTGG | | | | TGACCCC | | CATCTTGT | | | | | |
| | | | | | | | GTGT | | | | | |
| OT1-6 | CGGGGGAGGGAG | 1287. | 3 | | CCACCACATGTTC | 1288. | CTGGGTCT | 1289. | DMSO | 1 | 1 | 1 |
| | TTTGCTCCTGG | | | | TGGGTGC | | GTTCCCTG | | | | | |
| | | | | | | | TGGG | | | | | |
| OT1-7 | GAGTGGGTGGAG | 1290. | 3 | | GGCTCTCCCTGCC | 1291. | GCAGGTCA | 1292. | DMSO | 0 | 2 | 1 |
| | TTTGCTACAGG | | | | CTAGTTT | | AGTTGGAA | | | | | |
| | | | | | | | CCCG | | | | | |
| OT1-8 | GGGAGGGGAGAG | 1293. | 3 | | GGGGCTGAGAACA | 1294. | AGATTTGT | 1295. | DMSO | 1 | 0 | 2 |
| | TTTGTTCCAGG | | | | CATGAGATGCA | | GCACTGCC | | | | | |
| | | | | | | | TGCCT | | | | | |
| OT1-9 | GGGAGGGGGCAG | 1296. | 3 | | CCCGACCTCCGCT | 1297. | GGACCTCT | 1298. | DMSO | 2 | 1 | 0 |
| | GTTGCTCCAGG | | | | CCAAAGC | | GCACACCC | | | | | |
| | | | | | | | TGGC | | | | | |
| OT1-10 | GGGAGGGGGGAG | 1299. | 3 | | TGCAAGGTCGCAT | 1300. | CAGGAGGG | 1301. | DMSO | 1 | 1 | 1 |
| | TGTGTTCCGGG | | | | AGTCCCA | | GGAAGTGT | | | | | |
| | | | | | | | GTCC | | | | | |
| OT1-11 | GGGGAGGGGAAG | 1302. | 3 | | GCCCATTCTTTTT | 1303. | GAGAGCAA | 1304. | DMSO | 0 | 1 | 2 |
| | TTTGCTCCTGG | | | | GCAGTGGA | | GTTTGTTC | | | | | |
| | | | | | | | CCCAGG | | | | | |
| OT1-12 | GGGGGTGGGGAC | 1305. | 3 | | GCCCCCAGCCCCT | 1306. | GCTGCTGG | 1307. | DMSO | 1 | 2 | 0 |
| | TTTGCTCCAGG | | | | CTGTTTC | | TAGGGGAG | | | | | |
| | | | | | | | CTGG | | | | | |
| OT1-13 | GGGTCGGGGGAG | 1308. | 3 | | CGGCTGCCTTCCC | 1309. | GGGTGACG | 1310. | 72 C. | 1 | 2 | 0 |
| | TGGGCTCCAGG | | | | TGAGTCC | | CTTGCCAT | | Anneal, | | | |
| | | | | | | | GAGC | | 3% | | | |
| | | | | | | | | | DMSO | | | |
| OT1-14 | GGGTGGCTGGAG | 1311. | 3 | | TGACCCTGGAGTA | 1312. | GCTGAGAC | 1313. | 72 C. | 2 | 1 | 0 |
| | TTTGCTGCTGG | | | | CAAAATGTTCCCA | | AACCAGCC | | Anneal, | | | |
| | | | | | | | CAGCT | | 3% | | | |
| | | | | | | | | | DMSO | | | |
| OT1-15 | GGGTGGGGGGTG | 1314. | 3 | | TGCCTCCACCCTT | 1315. | GCAGCCGA | 1316. | DMSO | 1 | 0 | 2 |
| | CCTGCTCCAGG | | | | AGCCCCT | | TCCACACT | | | | | |
| | | | | | | | GGGG | | | | | |
| OT1-16 | GGTTGAGGGGAG | 1317. | 3 | | AACTCAGGACAAC | 1318. | CCCAGGAG | 1319. | DMSO | 0 | 1 | 2 |
| | TCTGCTCCAGG | | | | ACTGCCTGT | | CAGGGTAC | | | | | |
| | | | | | | | AATGC | | | | | |
| OT1-17 | GTGTGGGTGGCG | 1320. | 3 | | TCCTCCTTGGAGA | 1321. | CCTTGGAA | 1322. | DMSO | 0 | 3 | 0 |
| | TTTGCTCCAGG | | | | GGGGCCC | | GGGGCCTT | | | | | |
| | | | | | | | GGTGG | | | | | |
| OT1-18 | AGGTGGTGGGAG | 1323. | 4 | | CCGAGGGCATGGG | 1324. | GGCTGCTG | 1325. | DMSO | 0 | 1 | 3 |
| | CTTGTTCCTGG | | | | CAATCCT | | CGAGTTGC | | | | | |
| | | | | | | | CAAC | | | | | |
| OT1-19 | AGTTTGGGGGAG | 1326. | 4 | | TGCTTTGCATGGG | 1327. | GGGTTGCT | 1328. | DMSO | 0 | 2 | 2 |
| | TTTGCCCCAGG | | | | GTCTCAGACA | | TGCCCTCT | | | | | |
| | | | | | | | GTGT | | | | | |
| OT1-20 | ATGTGTGGGGAA | 1329. | 4 | | AGCTCCTTCTCAT | 1330. | CACAGAAG | 1331. | DMSO | 0 | 2 | 2 |
| | TTTGCTCCAGG | | | | TTCTCTTCTGCTG | | GATGTGTG | | | | | |
| | | | | | T | | CAGGTT | | | | | |
| OT1-21 | CAGTGGGGGGAG | 1332. | 4 | | AGCAGACACAGGT | 1333. | GGTCAGGT | 1334. | DMSO | 1 | 1 | 2 |
| | CTTTCTCCTGG | | | | GAATGCTGCT | | GTGCTGCT | | | | | |
| | | | | | | | AGGCA | | | | | |
| OT1-22 | GAGGGGGAGCAG | 1335. | 4 | | CCTGTGGGGCTCT | 1336. | ACTGCCTG | 1337. | No | 1 | 1 | 2 |
| | TTTGCTCCAGG | | | | CAGGTGC | | CCAAAGTG | | DMSO | | | |
| | | | | | | | GGTGT | | TD | | | |
| OT1-23 | GGAGGAGGGGAG | 1338. | 4 | | AGCTGCACTGGGG | 1339. | TGCCGGGT | 1340. | DMSO | 0 | 1 | 3 |
| | TCTGCTCCAGG | | | | AATGAGT | | AATAGCTG | | | | | |
| | | | | | | | GCTT | | | | | |
| OT1-24 | GGAGGGGGGGCT | 1341. | 4 | | CCAGCCTGGGCAA | 1342. | GGGGGCTT | 1343. | 72 C. | 0 | 3 | 1 |
| | TTTGCTCCAGG | | | | CAAAGCG | | CCAGGTCA | | Anneal, | | | |
| | | | | | | | CAGG | | 3% | | | |
| | | | | | | | | | DMSO, | | | |
| | | | | | | | | | 6% | | | |
| | | | | | | | | | DMSO | | | |
| OT1-25 | GGGCAAGGGGAG | 1344. | 4 | | TACCCCCACTGCC | 1345. | ACAGGTCC | 1346. | DMSO | 0 | 1 | 3 |
| | GTTGCTCCTGG | | | | CCATTGC | | ATGCTTAG | | | | | |
| | | | | | | | CAGAGGG | | | | | |
| OT1-26 | GGGTGATTGAAG | 1347. | 4 | GGGTGATTGAAGTT | ACGGATTCACGAC | 1348. | CCGAGTCC | 1349. | DMSO | 0/1 | 2 | 2 |
| | TTTGCTCCAGG | | | TGCTCCAGG (SEQ | GGAGGTGC | | GTGGCAGA | | | | | |
| | | | | ID NO: 2225) | | | GAGC | | | | | |
| | | | | GGGTGATTGAAGTT | | | | | | | | |
| | | | | TGCTGCAGG (SEQ | | | | | | | | |
| | | | | ID NO: 2226) | | | | | | | | |
| OT1-27 | GGGTGTGGGGTC | 1350. | 4 | | TGTGGTTGAAGTA | 1351. | TGGCCCAA | 1352. | DMSO | 3 | 1 | 0 |
| | ATTGCTCCAGG | | | | GGGGACAGGT | | TTGGAAGT | | | | | |
| | | | | | | | GATTTCGT | | | | | |
| OT1-28 | GGTGGGGGTGGG | 1353. | 4 | | TGGGATGGCAGAG | 1354. | GGCCCAAT | 1355. | DMSO | 0 | 3 | 1 |
| | TTTGCTCCTGG | | | | TCATCAACGT | | CGGTAGAG | | | | | |
| | | | | | | | GATGCA | | | | | |
| OT1-29 | GTGGGGGTAGAG | 1356. | 4 | | ATGGGGCGCTCCA | 1357. | TGCACCCA | 1358. | DMSO | 0 | 3 | 1 |
| | TTTGCTCCAGG | | | | GTCTGTG | | CACAGCCA | | | | | |
| | | | | | | | GCAA | | | | | |
| OT1-30 | TAGTGGAGGGAG | 1359. | 4 | | GGGGAGGGAGGAC | 1360. | AATTAGCT | 1361. | 72 C. | 0 | 1 | 3 |
| | CTTGCTCCTGG | | | | CAGGGAA | | GGGCGCGG | | Anneal, | | | |
| | | | | | | | TGGT | | 3% | | | |
| | | | | | | | | | DMSO | | | |
| OT1-31 | TGCTCGGGGGAG | 1362. | 4 | | ATCCCGTGCAGGA | 1363. | CAGGCGGC | 1364. | DMSO | 3 | 1 | 0 |
| | TTTGCACCAGG | | | | AGTCGCC | | CCCTTGAG | | | | | |
| | | | | | | | GAAT | | | | | |
| OT1-32 | TGGAGAGGGGAG | 1365. | 4 | | CCCCAACCCTTTG | 1366. | TGAGGAGA | 1367. | DMSO | 1 | 2 | 1 |
| | TTGGCTCCTGG | | | | CTCAGCG | | ACACCACA | | | | | |
| | | | | | | | GGCAGA | | | | | |
| OT1-33 | TGGTGTTGGGAG | 1368. | 4 | | ATCGACGAGGAGG | 1369. | CCCCTCAC | 1370. | DMSO | 0 | 3 | 1 |
| | TCTGCTCCAGG | | | | GGGCCTT | | TCAAGCAG | | | | | |
| | | | | | | | GCCC | | | | | |
| OT1-34 | TTGGGGGGGCAG | 1371. | 4 | | TGCTCAAGGGGCC | 1372. | CAGGGGCA | 1373. | No | 1 | 3 | 0 |
| | TTTGCTCCTGG | | | | TGTTCCA | | GTGGCAGG | | DMSO | | | |
| | | | | | | | AGTC | | | | | |
| OT1-35 | AAGTAAGGGAAG | 1374. | 5 | | TGCCTGGCACGCA | 1375. | GGGAAGGG | 1376. | DMSO | 0 | 0 | 5 |
| | TTTGCTCCTGG | | | | GTAGGTG | | GGAACAGG | | | | | |
| | | | | | | | TGCA | | | | | |
| OT1-36 | AGAAGAGGGGAT | 1377. | 5 | | Not optimized | | | | | 1 | 1 | 3 |
| | TTTGCTCCTGG | | | | | | | | | | | |
| OT1-37 | ATCTGGGGTGAT | 1378. | 5 | | ACCTGGGCTTGCC | 1379. | GCTGCTCG | 1380. | DMSO | 1 | 3 | 1 |
| | TTTGCTCCTGG | | | | ACTAGGG | | CAGTTAAG | | | | | |
| | | | | | | | CACCA | | | | | |
| OT1-38 | CTCTGCTGGGAG | 1381. | 5 | | GTGGCCGGGCTAC | 1382. | GGTTCCAC | 1383. | DMSO | 3 | 2 | 0 |
| | TTTGCTCCTGG | | | | TGCTACC | | AAGCTGGG | | | | | |
| | | | | | | | GGCA | | | | | |
| OT1-39 | CTGGTGGGGGAG | 1384. | 5 | | Not optimized | | | | | 1 | 3 | 1 |
| | CTTGCTCCAGG | | | | | | | | | | | |
| OT1-40 | CTTTCGGGGGAG | 1385. | 5 | | GCAAGAGGCGGAG | 1386. | AGAGTCAT | 1387. | DMSO | 2 | 3 | 0 |
| | TTTGCGCCGGG | | | | GAGACCC | | CCATTTCC | | | | | |
| | | | | | | | TGGGGGC | | | | | |
| OT1-41 | CTTTGGGGTTAG | 1388. | 5 | | GGGGTCAGTGGTG | 1389. | AGGGAATC | 1390. | 1M | 1 | 4 | 0 |
| | TTTGCTCCTGG | | | | ATATCCCCCT | | CTTTTTCC | | betaine, | | | |
| | | | | | | | ATTGCTTG | | TD | | | |
| | | | | | | | TTT | | | | | |
| OT1-42 | GCTCTGGGGTAG | 1391. | 5 | | AGAGAGGCCACGT | 1392. | GCCTCCCC | 1393. | DMSO | 1 | 3 | 1 |
| | TTTGCTCCAGG | | | | GGAGGGT | | TCCTCCTT | | | | | |
| | | | | | | | CCCA | | | | | |
| OT1-43 | GTCTCTCGGGAG | 1394. | 5 | | GACAGTGCCTTGC | 1395. | TCTGACCG | 1396. | DMSO | 3 | 2 | 0 |
| | TTTGCTCCGGG | | | | GATGCAC | | GTATGCCT | | | | | |
| | | | | | | | GACG | | | | | |
| OT1-44 | TCCTGAGGGCAG | 1397. | 5 | | TGTGTGAACGCAG | 1398. | TGGTCTAG | 1399. | DMSO | 3 | 1 | 1 |
| | TTTGCTCCAGG | | | | CCTGGCT | | TACTTCCT | | | | | |
| | | | | | | | CCAGCCTT | | | | | |
| OT1-45 | TCTTTGGGAGAG | 1400. | 5 | | GGTTCTCCCTTGG | 1401. | CCCACTGC | 1402. | DMSO | 1 | 3 | 1 |
| | TTTGCTCCAGG | | | | CTCCTGTGA | | TCCTAGCC | | | | | |
| | | | | | | | CTGC | | | | | |
| OT1-46 | ACAACTGGGGAG | 1403. | 6 | | TGAAGTCAACAAT | 1404. | AGCTTTGG | 1405. | DMSO | 3 | 1 | 2 |
| | TTTGCTCCTGG | | | | CTAAGCTTCCACC | | TAGTTGGA | | | | | |
| | | | | | T | | GTCTTTGA | | | | | |
| | | | | | | | AGG | | | | | |
| OT1-47 | ACAAGGTGGAAG | 1406. | 6 | | TGATTGGGCTGCA | 1407. | GCACAGCC | 1408. | DMSO | 2 | 1 | 3 |
| | TTTGCTCCTGG | | | | GTTCATGTACA | | TGCCCTTG | | | | | |
| | | | | | | | GAAG | | | | | |
| OT1-48 | ACATAGAAGGAG | 1409. | 6 | | TCCATGGGCCCCT | 1410. | AGCGGCTT | 1411. | DMSO | 1 | 0 | 5 |
| | TTTGCTCCAGG | | | | CTGAAAGA | | CTGCTTCT | | | | | |
| | | | | | | | GCGA | | | | | |
| OT1-49 | AGACCCAGGGAG | 1412. | 6 | | GCGGTTGGTGGGG | 1413. | GAGTTCCT | 1414. | DMSO | 2 | 0 | 4 |
| | TTTGCTCCCGG | | | | TTGATGC | | CCTCCCGC | | | | | |
| | | | | | | | CAGT | | | | | |
| OT1-50 | AGACCCAGGGAG | 1415. | 6 | | AGGCAAGATTTTC | 1416. | GCTTTTGC | 1417. | DMSO | 2 | 0 | 4 |
| | TTTGCTCCCGG | | | | CAGTGTGCAAGA | | CTGGGACT | | | | | |
| | | | | | | | CCGC | | | | | |
| OT1-51 | CACGGAGGGGTG | 1418. | 6 | | GCTGCTGGTCGGG | 1419. | GCTCTGTC | 1420. | No | 3 | 1 | 2 |
| | TTTGCTCCTGG | | | | CTCTCTG | | CCACTTCC | | DMSO | | | |
| | | | | | | | CCTGG | | TD | | | |
| OT1-52 | CAGAGCTTGGAG | 1421. | 6 | | GCTGCGAGGCTTC | 1422. | CGCCCCTA | 1423. | DMSO | 3 | 2 | 1 |
| | TTTGCTCCAGG | | | | CGTGAGA | | GAGCTAAG | | | | | |
| | | | | | | | GGGGT | | | | | |
| OT1-53 | CTATTGATGGAG | 1424. | 6 | | CCAGGAGCCTGAG | 1425. | AGGGCTAG | 1426. | DMSO | 1 | 3 | 2 |
| | TTTGCTCCTGG | | | | AGCTGCC | | GACTGCAG | | | | | |
| | | | | | | | TGAGC | | | | | |
| OT1-54 | CTTTCTAGGGAG | 1427. | 6 | | CTGTGCTCAGCCT | 1428. | GCCTGGGG | 1429. | DMSO | 2 | 3 | 1 |
| | TTTGCTCCTGG | | | | GGGTGCT | | CTGTGAGT | | | | | |
| | | | | | | | AGTTT | | | | | |
| OT1-55 | GCCATGCTGGAG | 1430. | 6 | | AGCTCGCGCCAGA | 1431. | ACTTGGCA | 1432. | 72 C. | 4 | 2 | 0 |
| | TTTGCTCCAGG | | | | TCTGTGG | | GGCTGAGG | | Anneal, | | | |
| | | | | | | | CAGG | | 3% | | | |
| | | | | | | | | | DMSO | | | |
| | | 1433. | | | | 1434. | | 1435. | | | | |
| Target 2 | GACCCCCTCCAC | 1436. | 0 | | AGAGAAGTCGAGG | 1437. | CAGCAGAA | 1438. | DMSO | | | |
| | CCCGCCTCCGG | | | | AAGAGAGAG | | AGTTCATG | | | | | |
| | | | | | | | GTTTCG | | | | | |
| OT2-1 | GACCCCCCCCAC | 1439. | 2 | | TGGACAGCTGCAG | 1440. | ACTGATCG | 1441. | DMSO | 0 | 0 | 2 |
| | CCCGCCCCCGG | | | | TACTCCCTG | | ATGATGGC | | | | | |
| | | | | | | | CTATGGGT | | | | | |
| OT2-2 | GGGCCCCTCCAC | 1442. | 2 | | CAAGATGTGCACT | 1443. | GCAGCCTA | 1444. | DMSO | 1 | 0 | 1 |
| | CCCGCCTCTGG | | | | TGGGCTA | | TTGTCTCC | | | | | |
| | | | | | | | TGGT | | | | | |
| OT2-3 | AACCCCATCCAC | 1445. | 3 | | GTCCAGTGCCTGA | 1446. | AGCATCAT | 1447. | DMSO | 1 | 1 | 1 |
| | CCGGCCTCAGG | | | | CCCTGGC | | GCCTCCAG | | | | | |
| | | | | | | | CTTCA | | | | | |
| OT2-4 | CACCCCCTCAAC | 1448. | 3 | | GCTCCCGATCCTC | 1449. | GCAGCTCC | 1450. | DMSO | 1 | 2 | 0 |
| | ACCGCCTCAGG | | | | TGCCACC | | CACCACCC | | | | | |
| | | | | | | | TCAG | | | | | |
| OT2-5 | CACCCCCTCCCC | 1451. | 3 | | GGGGACAGGCAGG | 1452. | GTGCGTGT | 1453. | DMSO | 1 | 1 | 1 |
| | TCCGCCTCAGG | | | | CAAGGAG | | CCGTTCAC | | | | | |
| | | | | | | | CCCT | | | | | |
| OT2-6 | CTACCCCTCCAC | 1454. | 3 | | AAGGGGCTGCTGG | 1455. | CGTGATTC | 1456. | DMSO | 2 | 1 | 0 |
| | CCCGCCTCCGG | | | | GTAGGAC | | GAGTTCCT | | | | | |
| | | | | | | | GGCA | | | | | |
| OT2-7 | GACCCGCCCCGC | 1457. | 3 | | GACCCTCAGGAAG | 1458. | CTGCGAGA | 1459. | 1M | 1 | 0 | 2 |
| | CCCGCCTCTGG | | | | CTGGGAG | | TGCCCCAA | | betaine, | | | |
| | | | | | | | ATCG | | TD | | | |
| OT2-8 | GATCGACTCCAC | 1460. | 3 | | CCGCGGCGCTCTG | 1461. | TGCTGGGA | 1462. | DMSO | 1 | 1 | 1 |
| | CCCGCCTCTGG | | | | CTAGA | | TTACAGGC | | | | | |
| | | | | | | | GCGA | | | | | |
| OT2-9 | GCCCCCACCCAC | 1463. | 3 | | CCAGGTGGTGTCA | 1464. | TGCCTGGC | 1465. | DMSO | 0 | 2 | 1 |
| | CCCGCCTCTGG | | | | GCGGAGG | | CCTCTCTG | | | | | |
| | | | | | | | AGTCT | | | | | |
| OT2-10 | GCCCCGCTCCTC | 1466. | 3 | | CGACTCCACGGCG | 1467. | CAGCGCAG | 1468. | 1M | 2 | 1 | 0 |
| | CCCGCCTCCGG | | | | TCTCAGG | | TCCAGCCC | | betaine, | | | |
| | | | | | | | GATG | | TD | | | |
| OT2-11 | GGCCCCCTCCAC | 1469. | 3 | | CTTCCCTCCCCCA | 1470. | GCTACAGG | 1471. | DMSO | 1 | 1 | 1 |
| | CAGGCCTCAGG | | | | GCACCAC | | TTGCACAG | | | | | |
| | | | | | | | TGAGAGGT | | | | | |
| OT2-12 | GGCCCCCTCCTC | 1472. | 3 | | CCCCGGGGAGTCT | 1473. | CCCAGCCG | 1474. | 72 C. | 1 | 0 | 2 |
| | CTCGCCTCTGG | | | | GTCCTGA | | TTCCAGGT | | Anneal, | | | |
| | | | | | | | CTTCC | | 3% | | | |
| | | | | | | | | | DMSO | | | |
| OT2-13 | GGCGCCCTCCAC | 1475. | 3 | | GAAGCGCGAAAAC | 1476. | TCCAGGGT | 1477. | DMSO | 1 | 0 | 2 |
| | CCTGCCTCGGG | | | | CCGGCTC | | CCTTCTCG | | | | | |
| | | | | | | | GCCC | | | | | |
| OT2-14 | GTCCTCCACCAC | 1478. | 3 | | AGGGTGGTCAGGG | 1479. | CATGGGGC | 1480. | DMSO | 2 | 0 | 1 |
| | CCCGCCTCTGG | | | | AGGCCTT | | TCGGACCT | | | | | |
| | | | | | | | CGTC | | | | | |
| OT2-15 | TACCCCCCACAC | 1481. | 3 | | GGGAAGAGGCAGG | 1482. | TGCCAGGA | 1483. | 72 C. | 0 | 2 | 1 |
| | CCCGCCTCTGG | | | | GCTGTCG | | AGGAAGCT | | Anneal, | | | |
| | | | | | | | GGCC | | 3% | | | |
| | | | | | | | | | DMSO | | | |
| OT2-16 | AACCCATTCCAC | 1484. | 4 | | GAGTGACGATGAG | 1485. | CCCTTAGC | 1486. | 68 C. | 0 | 1 | 3 |
| | CCTGCCTCAGG | | | | CCCCGGG | | TGCAGTCG | | Anneal, | | | |
| | | | | | | | CCCC | | 3% | | | |
| | | | | | | | | | DMSO | | | |
| OT2-17 | ACACCCCCCCAC | 1487. | 4 | | CCCATGAGGGGTT | 1488. | TGAAGATG | 1489. | DMSO | 0 | 2 | 2 |
| | CCCGCCTCAGG | | | | TGAGTGC | | GGCAGTTT | | | | | |
| | | | | | | | GGGG | | | | | |
| OT2-18 | AGCCCCCACCTC | 1490. | 4 | | CACCTGGGGCATC | 1491. | ACTGGGGT | 1492. | DMSO | 2 | 0 | 2 |
| | CCCGCCTCGGG | | | | TGGGTGG | | TGGGGAGG | | | | | |
| | | | | | | | GGAT | | | | | |
| OT2-19 | ATTCCCCCCCAC | 1493. | 4 | | TCATGATCCCCAA | 1494. | CCATTTGT | 1495. | DMSO | 1 | 0 | 3 |
| | CCCGCCTCAGG | | | | AAGGGCT | | GCTGATCT | | | | | |
| | | | | | | | GTGGGT | | | | | |
| OT2-20 | CCCCACCCCCAC | 1496. | 4 | | TGGTGCCCAGAAT | 1497. | AGGAAATG | 1498. | DMSO | 1 | 2 | 1 |
| | CCCGCCTCAGG | | | | AGTGGCCA | | TGTTGTGC | | | | | |
| | | | | | | | CAGGGC | | | | | |
| OT2-21 | CCCCCCCACCAC | 1499. | 4 | | GCCTCAGACAACC | 1500. | GCCAAGTG | 1501. | No | 2 | 1 | 1 |
| | CCCGCCCCGGG | | | | CTGCCCC | | TTACTCAT | | DMSO | | | |
| | | | | | | | CAAGAAAG | | TD | | | |
| | | | | | | | TGG | | | | | |
| OT2-22 | CCCCCCCCCCCC | 1502. | 4 | | GCCGGGACAAGAC | 1503. | TCCCGAAC | 1504. | DMSO | 1 | 2 | 1 |
| | CCCGCCTCAGG | | | | TGAGTTGGG | | TCCCGCAA | | | | | |
| | | | | | | | AACG | | | | | |
| OT2-23 | CGCCCTCCCCAC | 1505. | 4 | | TGCTGCAGGTGGT | 1506. | CTGGAACC | 1507. | No | 1 | 0 | 3 |
| | CCCGCCTCCGG | | | | TCCGGAG | | GCATCCTC | | DMSO | | | |
| | | | | | | | CGCA | | TD | | | |
| OT2-24 | CTCCCCACCCAC | 1508. | 4 | | ACACTGGTCCAGG | 1509. | GGCTGTGC | 1510. | DMSO | 2 | 1 | 1 |
| | CCCGCCTCAGG | | | | TCCCGTCT | | CTTCCGAT | | | | | |
| | | | | | | | GGAA | | | | | |
| OT2-25 | CTCTCCCCCCAC | 1511. | 4 | CTCTCCCCCCACCC | ATCGCGCCCAAAG | 1512. | AGGCTTCT | 1513. | DMSO | 3 | 0 | 2 |
| | CCCGCCTCTGG | | | CCCCTCTGG (SEQ | CACAGGT | | GGAAAAGT | | | | | |
| | | | | ID NO: 2227) | | | CCTCAATG | | | | | |
| | | | | | | | CA | | | | | |
| OT2-26 | GCCTCTCTGCAC | 1514. | 4 | | Not optimized | | | | | 1 | 1 | 2 |
| | CCCGCCTCAGG | | | | | | | | | | | |
| OT2-27 | GTCACTCCCCAC | 1515. | 4 | | CCCTCATGGTGGT | 1516. | AGCCACAC | 1517. | DMSO | 1 | 1 | 2 |
| | CCCGCCTCTGG | | | | CTTACGGCA | | ATCTTTCT | | | | | |
| | | | | | | | GGTAGGG | | | | | |
| OT2-28 | TGCCCCCTCCCC | 1518. | 4 | | TGCGTCGCTCATG | 1519. | AGGGTGGG | 1520. | DMSO | 0 | 3 | 1 |
| | CCAGCCTCTGG | | | | CTGGGAG | | GTGTACTG | | | | | |
| | | | | | | | GCTCA | | | | | |
| OT2-29 | TGCCCCTCCCAC | 1521. | 4 | | GAGCTGAGACGGC | 1522. | TGGCCTTG | 1523. | 1M | 0 | 1 | 3 |
| | CCCGCCTCTGG | | | | ACCACTG | | AACTCTTG | | betaine, | | | |
| | | | | | | | GGCT | | TD | | | |
| OT2-30 | TTCCCCTTCCAC | 1524. | 4 | | Not optimized | | | | | 1 | 2 | 1 |
| | CCAGCCTCTGG | | | | | | | | | | | |
| OT2-31 | TTCTCCCTCCTC | 1525. | 4 | | AGTGAGAGTGGCA | 1526. | CAGTAGGT | 1527. | DMSO | 2 | 1 | 1 |
| | CCCGCCTCGGG | | | | CGAACCA | | GGTCCCTT | | | | | |
| | | | | | | | CCGC | | | | | |
| OT2-32 | ACCCTCGCCCAC | 1528. | 5 | | Not optimized | | | | | 1 | 1 | 3 |
| | CCCGCCTCAGG | | | | | | | | | | | |
| OT2-33 | AGCCAACCCCAC | 1529. | 5 | | GGGAGAACCTTGT | 1530. | AAGCCGAA | 1531. | DMSO | 0 | 2 | 3 |
| | CCCGCCTCTGG | | | | CCAGCCT | | AAGCTGGG | | | | | |
| | | | | | | | CAAA | | | | | |
| OT2-34 | AGGCCCCCACAC | 1532. | 5 | | CTTCCCAGTGTGG | 1533. | ACACAGTC | 1534. | DMSO | 1 | 1 | 3 |
| | CCCGCCTCAGG | | | | CCCGTCC | | AGAGCTCC | | | | | |
| | | | | | | | GCCG | | | | | |
| OT2-35 | AGGCCCCCCCGC | 1535. | 5 | | Not optimized | | | | | 1 | 0 | 4 |
| | CCCGCCTCAGG | | | | | | | | | | | |
| OT2-36 | ATCTGCCACCAC | 1536. | 5 | | CTGAGAGGGGGAG | 1537. | TCGACTGG | 1538. | 68 C. | 3 | 0 | 2 |
| | CCCGCCTCCGG | | | | GGGGAGG | | TCTTGTCC | | Anneal, | | | |
| | | | | | | | TCCCA | | 3% | | | |
| | | | | | | | | | DMSO | | | |
| OT2-37 | CATCTTCCCCAC | 1539. | 5 | | CAGCCTGCTGCAT | 1540. | TGCAGCCA | 1541. | 1M | 1 | 0 | 4 |
| | CCCGCCTCTGG | | | | CGGAAAA | | AGAGAAAA | | betaine, | | | |
| | | | | | | | AGCCT | | TD | | | |
| OT2-38 | CTTTCCCTCCAC | 1542. | 5 | | TCCCTCTGACCCG | 1543. | ACCCGACT | 1544. | DMSO | 2 | 1 | 2 |
| | CCAGCCTCTGG | | | | GAACCCA | | TCCTCCCC | | | | | |
| | | | | | | | ATTGC | | | | | |
| OT2-39 | GTCGAGGTCCAC | 1545. | 5 | | TGGGGGTTGCGTG | 1546. | GCCAGGAG | 1547. | DMSO | 4 | 1 | 0 |
| | CCCGCCTCAGG | | | | CTTGTCA | | GACACCAG | | | | | |
| | | | | | | | GACC | | | | | |
| OT2-40 | GTCGAGGTCCAC | 1548. | 5 | | ATCAGGTGCCAGG | 1549. | GGCCTGAG | 1550. | DMSO | 4 | 1 | 0 |
| | CCCGCCTCAGG | | | | AGGACAC | | AGTGGAGA | | | | | |
| | | | | | | | GTGG | | | | | |
| OT2-41 | TCAGACCTCCAC | 1551. | 5 | | Not optimized | | | | | 1 | 4 | 0 |
| | CCCGCCTCAGG | | | | | | | | | | | |
| OT2-42 | TGCAACCTCCTC | 1552. | 5 | | TGAGCCACATGAA | 1553. | ACCTCTCC | 1554. | DMSO | 1 | 3 | 1 |
| | CCCGCCTCGGG | | | | TCAAGGCCTCC | | AAGTCTCA | | | | | |
| | | | | | | | GTAACTCT | | | | | |
| | | | | | | | CT | | | | | |
| OT2-43 | ACCAGTCTGCAC | 1555. | 6 | | GGTCCCTCTGTGC | 1556. | CTTTGGTG | 1557. | DMSO | 2 | 2 | 2 |
| | CCCGCCTCTGG | | | | AGTGGAA | | GACCTGCA | | | | | |
| | | | | | | | CAGC | | | | | |
| OT2-44 | ACTACCCACCTC | 1558. | 6 | | GCGAGGCTGCTGA | 1559. | GCTGGGAC | 1560. | DMSO | 2 | 2 | 2 |
| | CCCGCCTCAGG | | | | CTTCCCT | | TACAGACA | | | | | |
| | | | | | | | TGTGCCA | | | | | |
| OT2-45 | ATTTCCCCCCCC | 1561. | 6 | ATTTCCTCCCCCCC | ATTGCAGGCGTGT | 1562. | AAATCCTG | 1563. | DMSO | 1 | 1 | 5 |
| | CCCGCCTCAGG | | | C-CCTCAGG (SEQ | CCAGGCA | | CATGGTGA | | | | | |
| | | | | ID NO:2228) | | | TGGGAGT | | | | | |
| OT2-46 | CCACCATCCCAC | 1564. | 6 | | TGCTCTGCCATTT | 1565. | ACAGCCTC | 1566. | DMSO | 1 | 3 | 2 |
| | CCCGCCTCTGG | | | | ATGTCCTATGAAC | | TTCTCCAT | | | | | |
| | | | | | T | | GACTGAGC | | | | | |
| OT2-47 | CCCAAGCCCCAC | 1567. | 6 | | TCCGCCCAAACAG | 1568. | GCGGTGGG | 1569. | DMSO | 2 | 3 | 1 |
| | CCCGCCTCGGG | | | | GAGGCAG | | GAAGCCAT | | | | | |
| | | | | | | | TGAG | | | | | |
| OT2-48 | CCGCGCTTCCGC | 1570. | 6 | | GGGGGTCTGGCTC | 1571. | CCTGTCGG | 1572. | DMSO | 3 | 1 | 2 |
| | CCCGCCTCTGG | | | | ACCTGGA | | GAGAGTGC | | | | | |
| | | | | | | | CTGC | | | | | |
| OT2-49 | CCTGCCATGCAC | 1573. | 6 | | TCCTGGTTCATTT | 1574. | ACTCCAGA | 1575. | DMSO | 3 | 2 | 1 |
| | CCCGCCTCAGG | | | | GCTAGAACTCTGG | | TGCAACCA | | | | | |
| | | | | | A | | GGGCT | | | | | |
| OT2-50 | CTGCCTCCTCAC | 1576. | 6 | | CGTGTGGTGAGCC | 1577. | GCTTCACC | 1578. | DMSO | 3 | 0 | 3 |
| | CCCGCCTCAGG | | | | TGAGTCT | | GTAGAGGC | | | | | |
| | | | | | | | TGCT | | | | | |
| OT2-51 | TCTTCTTTCCAC | 1579. | 6 | | AGGCCCTGATAAT | 1580. | TCAGTGAC | 1581. | DMSO | 0 | 2 | 4 |
| | CCCGCCTCAGG | | | | TCATGCTACCAA | | AACCTTTT | | | | | |
| | | | | | | | GTATTCGG | | | | | |
| | | | | | | | CA | | | | | |
| OT2-52 | TTGACCCCCCGC | 1582. | 6 | | Not optimized | | | | | 2 | 2 | 2 |
| | CCCGCCTCAGG | | | | | | | | | | | |
| Target 3 | GGTGAGTGAGTG | 1583. | 0 | | TCCAGATGGCACA | 1584. | AGGGAGCA | 1585. | DMSO | | | |
| | TGTGCGTGTGG | | | | TTGTCAG | | GGAAAGTG | | | | | |
| | | | | | | | AGGT | | | | | |
| OT3-1 | GGTGAGTGAGTG | 1586. | 1 | | GCAGGCAAGCTGT | 1587. | CACCGACA | 1588. | DMSO | 0 | 0 | 1 |
| | TGTGTGTGAGG | | | | CAAGGGT | | CACCCACT | | | | | |
| | | | | | | | CACC | | | | | |
| OT3-2 | AGTGAGTGAGTG | 1589. | 2 | | GAGGGGGAAGTCA | 1590. | TACCCGGG | 1591. | DMSO | 0 | 0 | 2 |
| | TGTGTGTGGGG | | | | CCGACAA | | CCGTCTGT | | | | | |
| | | | | | | | TAGA | | | | | |
| OT3-3 | AGTGTGTGAGTG | 1592. | 2 | | GACACCCCACACA | 1593. | TGAATCCC | 1594. | DMSO | 1 | 0 | 1 |
| | TGTGCGTGTGG | | | | CTCTCATGC | | TTCACCCC | | | | | |
| | | | | | | | CAAG | | | | | |
| OT3-4 | GCTGAGTGAGTG | 1595. | 2 | | TCCTTTGAGGTTC | 1596. | CCAATCCA | 1597. | DMSO | 1 | 0 | 1 |
| | TATGCGTGTGG | | | | ATCCCCC | | GGATGATT | | | | | |
| | | | | | | | CCGC | | | | | |
| OT3-5 | GGTGAGTCAGTG | 1598. | 2 | | CAGGGCCAGGAAC | 1599. | GGGAGGTA | 1600. | DMSO | 1 | 1 | 0 |
| | TGTGAGTGAGG | | | | ACAGGAA | | TGTGCGGG | | | | | |
| | | | | | | | AGTG | | | | | |
| OT3-6 | GGTGAGTGAGAG | 1601. | 2 | | TGCAGCCTGAGTG | 1602. | GCCCAGGT | 1603. | DMSO | 1 | 0 | 1 |
| | TGTGTGTGTGG | | | | AGCAAGTGT | | GCTAAGCC | | | | | |
| | | | | | | | CCTC | | | | | |
| OT3-7 | GGTGAGTGAGTG | 1604. | 2 | | TACAGCCTGGGTG | 1605. | TGTGTCAT | 1606. | 1M | 1 | 1 | 0 |
| | AGTGAGTGAGG | | | | ATGGAGC | | GGACTTTC | | betaine, | | | |
| | | | | | | | CCATTGT | | TD | | | |
| OT3-8 | GGTGAGTGAGTG | 1607. | 2 | | GGCAGGCATTAAA | 1608. | TCTCCCCC | 1609. | DMSO | 1 | 1 | 0 |
| | AGTGAGTGAGG | | | | CTCATCAGGTCC | | AAGGTATC | | | | | |
| | | | | | | | AGAGAGCT | | | | | |
| OT3-9 | GGTGAGTGAGTG | 1610. | 2 | | GGGCCTCCCTGCT | 1611. | GCTGCCGT | 1612. | DMSO | 0 | 1 | 1 |
| | CGTGCGGGTGG | | | | GGTTCTC | | CCGAACCC | | | | | |
| | | | | | | | AAGA | | | | | |
| OT3-10 | GGTGAGTGTGTG | 1613. | 2 | | ACAAACGCAGGTG | 1614. | ACTCCGAA | 1615. | DMSO | 1 | 1 | 0 |
| | TGTGAGTGTGG | | | | GACCGAA | | AATGCCCC | | | | | |
| | | | | | | | GCAGT | | | | | |
| OT3-11 | GGTGAGTGTGTG | 1616. | 2 | | AGGGGAGGGGACA | 1617. | TTGAGAGG | 1618. | DMSO | 1 | 0 | 1 |
| | TGTGCATGTGG | | | | TTGCCT | | GTTCAGTG | | | | | |
| | | | | | | | GTTGC | | | | | |
| OT3-12 | GGTGTGTGAGTG | 1619. | 2 | | CTAATGCTTACGG | 1620. | AGCCAACG | 1621. | DMSO | 1 | 0 | 1 |
| | TGTGTGTGTGG | | | | CTGCGGG | | GCAGATGC | | | | | |
| | | | | | | | AAAT | | | | | |
| OT3-13 | GGTGTGTGTGTG | 1622. | 2 | | GAGCGAAGTTAAC | 1623. | CACACATG | 1624. | 68 C., | 2 | 0 | 0 |
| | TGTGCGTGCGG | | | | CCACCGC | | CACATGCC | | 3% | | | |
| | | | | | | | CCTG | | DMSO | | | |
| OT3-14 | GGTGTGTGTGTG | 1625. | 2 | | GCATGTGTCTAAC | 1626. | TCCCCCAT | 1627. | DMSO | 2 | 0 | 0 |
| | TGTGCGTGTGG | | | | TGGAGACAATAGC | | ATCAACAC | | | | | |
| | | | | | A | | ACACA | | | | | |
| OT3-15 | GGTGTGTGTGTG | 1628. | 2 | | GCCCCTCCCGCCT | 1629. | TGGGCAAA | 1630. | DMSO | 2 | 0 | 0 |
| | TGTGCGTGTGG | | | | TTTGTGT | | GGACATGA | | | | | |
| | | | | | | | AACAGACA | | | | | |
| OT3-16 | GGTGTGTGTGTG | 1631. | 2 | | GCCTCAGCTCTGC | 1632. | ACGAACAG | 1633. | DMSO | 2 | 0 | 0 |
| | TGTGCGTGTGG | | | | TCTTAAGCCC | | ATCATTTT | | | | | |
| | | | | | | | TCATGGCT | | | | | |
| | | | | | | | TCC | | | | | |
| OT3-17 | GTTGAGTGAATG | 1634. | 2 | | CTCCAGAGCCTGG | 1635. | CCCTCTCC | 1636. | DMSO | 0 | 1 | 1 |
| | TGTGCGTGAGG | | | | CCTACCA | | GGAAGTGC | | | | | |
| | | | | | | | CTTG | | | | | |
| OT3-18 | TGTGGGTGAGTG | 1637. | 2 | | TCTGTCACCACAC | 1638. | GTTGCCTG | 1639. | DMSO | 0 | 1 | 1 |
| | TGTGCGTGAGG | | | | AGTTACCACC | | GGGATGGG | | | | | |
| | | | | | | | GTAT | | | | | |
| OT3-19 | ACTGTGTGAGTG | 1640. | 3 | | GGGGACCCTCAAG | 1641. | GGGCATCA | 1642. | DMSO | 2 | 0 | 1 |
| | TGTGCGTGAGG | | | | AGGCACT | | AAGGATGG | | | | | |
| | | | | | | | GGAT | | | | | |
| OT3-20 | AGAGAGTGAGTG | 1643. | 3 | | TGTGGAGGGTGGG | 1644. | ACAGTGAG | 1645. | DMSO | 1 | 0 | 2 |
| | TGTGCATGAGG | | | | ACCTGGT | | GTGCGGTC | | | | | |
| | | | | | | | TTTGGG | | | | | |
| OT3-21 | AGCGAGTGGGTG | 1646. | 3 | | CGGGGTGGCAGTG | 1647. | GGTGCAGT | 1648. | DMSO | 0 | 0 | 3 |
| | TGTGCGTGGGG | | | | ACGTCAA | | CCAAGAGC | | | | | |
| | | | | | | | CCCC | | | | | |
| OT3-22 | AGGGAGTGACTG | 1649. | 3 | | AGCTGAGGCAGAG | 1650. | GGGAGACA | 1651. | DMSO | 1 | 1 | 1 |
| | TGTGCGTGTGG | | | | TCCCCGA | | GAGCAGCG | | | | | |
| | | | | | | | CCTC | | | | | |
| OT3-23 | AGTGAGTGAGTG | 1652. | 3 | | ACCACCAGACCCC | 1653. | AGGACGAC | 1654. | 72 C. | 1 | 1 | 1 |
| | AGTGAGTGAGG | | | | ACCTCCA | | TTGTGCCC | | Anneal, | | | |
| | | | | | | | CATCA | | 3% | | | |
| | | | | | | | | | DMSO | | | |
| OT3-24 | CATGAGTGAGTG | 1655. | 3 | | GGGTCAGGACGCA | 1656. | TCCACCCA | 1657. | 72 C. | 2 | 0 | 1 |
| | TGTGGGTGGGG | | | | GGTCAGA | | CCCACCCA | | Anneal, | | | |
| | | | | | | | TCCT | | 3% | | | |
| | | | | | | | | | DMSO | | | |
| OT3-25 | CGTGAGTGTGTG | 1658. | 3 | | ACACTCTGGGCTA | 1659. | GCCCCCTC | 1660. | DMSO | 2 | 0 | 1 |
| | TATGCGTGTGG | | | | GGTGCTGGA | | ACCACATG | | | | | |
| | | | | | | | ATGCT | | | | | |
| OT3-26 | GGACTGTGAGTG | 1661. | 3 | | GGGGCCATTCCTC | 1662. | TGGGGATC | 1663. | DMSO | 3 | 0 | 0 |
| | TGTGCGTGAGG | | | | TGCTGCA | | CTTGCTCA | | | | | |
| | | | | | | | TGGC | | | | | |
| OT3-27 | GGTGTGTGCCTG | 1664. | 3 | | ACACACTGGCTCG | 1665. | CCTGCACG | 1666. | DMSO | 2 | 1 | 0 |
| | TGTGCGTGTGG | | | | CATTCACCA | | AGGCCAGG | | | | | |
| | | | | | | | TGTT | | | | | |
| OT3-28 | GTTTCATGAGTG | 1667. | 3 | | TGGGCACGTAGTA | 1668. | CTCGCCGC | 1669. | DMSO | 0 | 3 | 1 |
| | TGTGCGTGGGG | | | | AACTGCACCA | | CGTGACTG | | | | | |
| | | | | | | | TAGG | | | | | |
| OT3-29 | TGAGTGTGAGTG | 1670. | 3 | | TCAGCTGGTCCTG | 1671. | AGAGCACT | 1672. | DMSO | 2 | 1 | 0 |
| | TGTGCGTGGGG | | | | GGCTTGG | | GGGTAGCA | | | | | |
| | | | | | | | GTCAGT | | | | | |
| OT3-30 | TGCCAGTGAGTG | 1673. | 3 | | AGACACAGCCAGG | 1674. | GGTGGGCG | 1675. | 68 C., | 1 | 1 | 1 |
| | TGTGCGTGTGG | | | | GCCTCAG | | TGTGTGTG | | 3% | | | |
| | | | | | | | TACC | | DMSO | | | |
| OT3-31 | TGGGTGTGAGTG | 1676. | 3 | | ACACTCTCACACA | 1677. | GAGAAGTC | 1678. | 72 C. | 1 | 2 | 0 |
| | TGTGCGTGTGG | | | | CGCACCAA | | AGGGCTGG | | Anneal, | | | |
| | | | | | | | CGGG | | 3% | | | |
| | | | | | | | | | DMSO | | | |
| OT3-32 | TGTATGTGAGTG | 1679. | 3 | | ACTGCCTGCATTT | 1680. | TGGTGAGG | 1681. | DMSO | 1 | 1 | 1 |
| | TGTGCGTGTGG | | | | CCCCGGT | | GCTTCAGG | | | | | |
| | | | | | | | GAGC | | | | | |
| OT3-33 | TGTGAGAGAGAG | 1682. | 3 | | GCCAGGTTCATTG | 1683. | TCCTTCTA | 1684. | DMSO | 2 | 1 | 0 |
| | TGTGCGTGTGG | | | | ACTGCCC | | CACATCGG | | | | | |
| | | | | | | | CGGC | | | | | |
| OT3-34 | TGTGCCTGAGTG | 1685. | 3 | | CGAGGGAGCCGAG | 1686. | CTGACCTG | 1687. | DMSO | 1 | 2 | 0 |
| | TGTGCGTGTGG | | | | TTCGTAA | | GGGCTCTG | | | | | |
| | | | | | | | GTAC | | | | | |
| OT3-35 | TGTGTGTGTGTG | 1688. | 3 | | TCCTCGGGAAGTC | 1689. | GCACTGAG | 1690. | DMSO | 2 | 1 | 0 |
| | TGTGCGTGTGG | | | | ATGGCTTCA | | CAACCAGG | | | | | |
| | | | | | | | AGCAC | | | | | |
| OT3-36 | AGCGTGTGAGTG | 1691. | 4 | | Not optimized | | | | | 1 | 0 | 3 |
| | TATGCGTGGGG | | | | | | | | | | | |
| OT3-37 | ATTGAGTGTGTG | 1692. | 4 | | TAAACCGTTGCCC | 1693. | GCTCCCCT | 1694. | DMSO | 2 | 1 | 1 |
| | AGTGCGTGGGG | | | | CCGCCTC | | GCCAGGTG | | | | | |
| | | | | | | | AACC | | | | | |
| OT3-38 | CATGTGTGGGTG | 1695. | 4 | | CCTGCTGAGACTC | 1696. | CTGCGGAG | 1697. | DMSO | 2 | 0 | 2 |
| | TGTGCGTGTGG | | | | CAGGTCC | | TGGCTGGC | | | | | |
| | | | | | | | TATA | | | | | |
| OT3-39 | CCCGAGTGTGTG | 1698. | 4 | | CTCGGGGACTGAC | 1699. | GGAGCAGC | 1700. | DMSO | 3 | 0 | 1 |
| | TGTGCGTGTGG | | | | AAGCCGG | | TCTTCCAG | | | | | |
| | | | | | | | GGCC | | | | | |
| OT3-40 | CTGGAGTGAGTG | 1701. | 4 | | CCCCGACCAAAGC | 1702. | CTGGCAGC | 1703. | DMSO | 1 | 2 | 1 |
| | TGTGTGTGTGG | | | | AGGAGCA | | CTCTGGAT | | | | | |
| | | | | | | | GGGG | | | | | |
| OT3-41 | GTTTCATGAGTG | 1704. | 4 | | Not optimized | | | | | 0 | 3 | 1 |
| | TGTGCGTGGGG | | | | | | | | | | | |
| OT3-42 | TATGTGTGCGTG | 1705. | 4 | | ATTTCAGAGCCCC | 1706. | AGGCCGCG | 1707. | DMSO | 1 | 2 | 1 |
| | TGTGCGTGTGG | | | | GGGGAAA | | GTGTTATG | | | | | |
| | | | | | | | GTTA | | | | | |
| OT3-43 | TATGTGTGTGTG | 1708. | 4 | | GCCAGTGGCTTAG | 1709. | TGACATAT | 1710. | DMSO | 2 | 1 | 1 |
| | TGTGCGTGGGG | | | | TGTCTTTGTGT | | TTTCCTGG | | | | | |
| | | | | | | | GCCATGGG | | | | | |
| | | | | | | | T | | | | | |
| OT3-44 | TCTGTGTGTGTG | 1711. | 4 | | TGCCAGAAGAACA | 1712. | CCATGCTG | 1713. | DMSO | 3 | 1 | 0 |
| | TGTGCGTGGGG | | | | TGGGCCAGA | | ACATCATA | | | | | |
| | | | | | | | TACTGGGA | | | | | |
| | | | | | | | AGC | | | | | |
| OT3-45 | TCTGTGTGTGTG | 1714. | 4 | | GCGTGTCTCTGTG | 1715. | CCAGGCTG | 1716. | DMSO | 3 | 1 | 0 |
| | TGTGCGTGTGG | | | | TGCGTGC | | GGCACACA | | | | | |
| | | | | | | | GGTT | | | | | |
| OT3-46 | TGAGCGTGAGTG | 1717. | 4 | | Not optimized | | | | | 2 | 2 | 0 |
| | TGAGCGTGTGG | | | | | | | | | | | |
| OT3-47 | TGTCTTTGAGTG | 1718. | 4 | | TGCCCAGTCCAAT | 1719. | AGGATGAG | 1720. | DMSO | 2 | 2 | 0 |
| | TGTGCGTGTGG | | | | ATTTCAGCAGCT | | TTCATGTC | | | | | |
| | | | | | | | CTTTGTGG | | | | | |
| | | | | | | | GG | | | | | |
| OT3-48 | TTTGTGTGTGTG | 1721. | 4 | | GGGTGAAAATTTG | 1722. | AATGACTC | 1723. | DMSO | 2 | 2 | 0 |
| | TGTGCGTGTGG | | | | GTACTGTTAGCTG | | ATTCCCTG | | | | | |
| | | | | | T | | GGTATCTC | | | | | |
| | | | | | | | CCA | | | | | |
| OT3-49 | AAGGCGTGTGTG | 1724. | 5 | | TGCCCCATCAATC | 1725. | CAAGGTCG | 1726. | DMSO | 1 | 2 | 2 |
| | TGTGCGTGTGG | | | | ACCTCGGC | | GCAGGGCA | | | | | |
| | | | | | | | GTGA | | | | | |
| OT3-50 | AATTCGTGTGTG | 1727. | 5 | | GCCTCCTCTGCCG | 1728. | TGAGAGTT | 1729. | DMSO | 1 | 2 | 2 |
| | TGTGCGTGGGG | | | | CTGGTAA | | CCTGTTGC | | | | | |
| | | | | | | | TCCACACT | | | | | |
| OT3-51 | ATGGTGTGTGTG | 1730. | 5 | | Not optimized | | | | | 2 | 2 | 1 |
| | TGTGCGTGTGG | | | | | | | | | | | |
| OT3-52 | CACGTGTGTGTG | 1731. | 5 | | GCCACCAAAATAG | 1732. | ACATGCAT | 1733. | DMSO | 3 | 0 | 2 |
| | TGTGCGTGTGG | | | | CCAGCGT | | CTGTGTGT | | | | | |
| | | | | | | | GCGT | | | | | |
| OT3-53 | GAAATTTGAGTG | 1734. | 5 | | ACAGACTGACCCT | 1735. | TGTATCTT | 1736. | DMSO | 2 | 1 | 2 |
| | TGTGCGTGTGG | | | | TGAAAAATACCAG | | TCTTGCCA | | | | | |
| | | | | | T | | ATGGTTTT | | | | | |
| | | | | | | | CCC | | | | | |
| OT3-54 | TAAGTGTGTGTG | 1737. | 5 | | AGCCAAATTTCTC | 1738. | TCCTGGAG | 1739. | DMSO | 3 | 1 | 1 |
| | TGTGCGTGTGG | | | | AACAGCAGCACT | | AGCAGGCA | | | | | |
| | | | | | | | TTTTTGT | | | | | |
| OT3-55 | TATATGTGTGTG | 1740. | 5 | | ACCTCCTTGTGCT | 1741. | GGCGGGAA | 1742. | DMSO | 2 | 1 | 2 |
| | TGTGCGTGGGG | | | | GGTAACCC | | GCCTGGC | | | | | |
| | | | | | | | TGGG | | | | | |
| OT3-56 | TATCTGTGTGTG | 1743. | 5 | | CACAAAGCTCTAC | 1744. | TGATCCGA | 1745. | DMSO | 3 | 1 | 1 |
| | TGTGCGTGTGG | | | | CTTTCCAGTAGTG | | TGGTTGTT | | | | | |
| | | | | | T | | CACAGCT | | | | | |
| OT3-57 | TTTATGTGTGTG | 1746. | 5 | | TGTGGGGATTACC | 1747. | ACGCACAA | 1748. | DMSO | 2 | 2 | 1 |
| | TGTGCGTGTGG | | | | TGCCTGGC | | AAATGCCC | | | | | |
| | | | | | | | TTGTCA | | | | | |
| OT3-58 | TTTTTGTGTGTG | 1749. | 5 | | TGAGGCAGACCAG | 1750. | GCCCGAGC | 1751. | DMSO | 2 | 3 | 0 |
| | TGTGCGTGGGG | | | | TCATCCAGC | | ACAGTGTA | | | | | |
| | | | | | | | GGGC | | | | | |
| OT3-59 | AAAAATTGTGTG | 1752. | 6 | | ATTAGCTGGGCGT | 1753. | ACTGCATC | 1754. | DMSO | 2 | 1 | 3 |
| | TGTGCGTGGGG | | | | GGCGGAG | | TCATCTCA | | | | | |
| | | | | | | | GGCAGCT | | | | | |
| OT3-60 | ACAATGTGTGTG | 1755. | 6 | | TGAAGCAGAAGGA | 1756. | TCAGCTTC | 1757. | DMSO | 4 | 0 | 2 |
| | TGTGCGTGTGG | | | | GTGGAGAAGGA | | ACATCTGT | | | | | |
| | | | | | | | TTCAGTTC | | | | | |
| | | | | | | | AGT | | | | | |
| OT3-61 | ATGTGGTGTGTG | 1758. | 6 | | TGGTGGAGTGTGT | 1759. | AGAGCAGA | 1760. | DMSO | 1 | 3 | 2 |
| | TGTGCGTGTGG | | | | GTGTGGT | | AAGAGAGT | | | | | |
| | | | | | | | GCCCA | | | | | |
| OT3-62 | CAAAATTGTGTG | 1761. | 6 | | GCCCCTGTACGTC | 1762. | TGCACAAG | 1763. | DMSO | 3 | 1 | 2 |
| | TGTGCGTGTGG | | | | CTGACAGC | | CCACTTAG | | | | | |
| | | | | | | | CCTCTCT | | | | | |
| OT3-63 | CCCTGGTGTGTG | 1764. | 6 | | AGCGCAGGTAAAC | 1765. | TCTCTCGC | 1766. | DMSO | 3 | 1 | 2 |
| | TGTGCGTGTGG | | | | AGGCCCA | | CCCGTTTC | | | | | |
| | | | | | | | CTTGT | | | | | |
| OT3-64 | TCCGCTTGTGTG | 1767. | 6 | | ATGGGTGCCAGGT | 1768. | ACAGCAGG | 1769. | DMSO | 2 | 3 | 1 |
| | TGTGCGTGGGG | | | | ACCACGC | | AAGGAGCC | | | | | |
| | | | | | | | GCAG | | | | | |
| OT3-65 | TCCTCGTGTGTG | 1770. | 6 | | CGGGCGGGTGGAC | 1771. | AGGAGGTC | 1772. | DMSO | 2 | 3 | 1 |
| | TGTGCGTGTGG | | | | AGATGAG | | TCGAGCCA | | | | | |
| | | | | | | | GGGG | | | | | |
| OT3-66 | TTAAGGTGGGTG | 1773. | 6 | | TCAACCTAGTGAA | 1774. | GTCTATAT | 1775. | DMSO | 1 | 2 | 3 |
| | TGTGCGTGGGG | | | | CACAGACCACTGA | | ACAGCCCA | | | | | |
| | | | | | | | CAACCTCA | | | | | |
| | | | | | | | TGT | | | | | |
| OT3-67 | TTATATTGTGTG | 1776. | 6 | | GCCAGGGCCAGTG | 1777. | TGTCATTT | 1778. | DMSO | 2 | 4 | 0 |
| | TGTGCGTGGGG | | | | GATTGCT | | CTTAGTAT | | | | | |
| | | | | | | | GTCAGCCG | | | | | |
| | | | | | | | GA | | | | | |
| OT3-68 | TTGAGGAGAGTG | 1779. | 6 | | GAGCCCCACCGGT | 1780. | GCCAGAGC | 1781. | DMSO | 1 | 3 | 2 |
| | TGTGCGTGAGG | | | | TCAGTCC | | TACCCACT | | | | | |
| | | | | | | | CGCC | | | | | |
| | | 1782. | | | | 1783. | | 1784. | | | | |
| Target 4 | GAGTCCGAGCAG | 1785. | 0 | | GGAGCAGCTGGTC | 1786. | GGGAAGGG | 1787. | DMSO | | | |
| | AAGAAGAAGGG | | | | AGAGGGG | | GGACACTG | | | | | |
| | | | | | | | GGGA | | | | | |
| OT4-1 | GAGTTAGAGCAG | 1788. | 2 | | TCTCTCCTTCAAC | 1789. | ATCTGCAC | 1790. | DMSO | 0 | 1 | 1 |
| | AAGAAGAAAGG | | | | TCATGACCAGCT | | ATGTATGT | | | | | |
| | | | | | | | ACAGGAGT | | | | | |
| | | | | | | | CAT | | | | | |
| OT4-2 | AAGTCAGAGGAG | 1791. | 3 | AAGACAGAGGAGAA | TGGGGAATCTCCA | 1792. | AGGGTGTA | 1793. | DMSO | 2 | 1 | 1 |
| | AAGAAGAAGGG | | | GAAGAAGGG (SEQ | AAGAACCCCC | | CTGTGGGA | | | | | |
| | | | | ID NO: 2229) | | | ACTTTGCA | | | | | |
| OT4-3 | AAGTCCGAGGAG | 1794. | 3 | | GATGGCCCCACTG | 1795. | ACTTCGTA | 1796. | DMSO | 1 | 0 | 2 |
| | AGGAAGAAAGG | | | | AGCACGT | | GAGCCTTA | | | | | |
| | | | | | | | AACATGTG | | | | | |
| | | | | | | | GC | | | | | |
| OT4-4 | AAGTCTGAGCAC | 1797. | 3 | | AGGATTAATGTTT | 1798. | TCAAACAA | 1799. | 1M | 1 | 0 | 2 |
| | AAGAAGAATGG | | | | AAAGTCACTGGTG | | GGTGCAGA | | betaine, | | | |
| | | | | | G | | TACAGCA | | TD | | | |
| OT4-5 | ACGTCTGAGCAG | 1800. | 3 | | TCCAAGCCACTGG | 1801. | TGCTCTGT | 1802. | DMSO | 0 | 1 | 2 |
| | AAGAAGAATGG | | | | TTTCTCAGTCA | | GGATCATA | | | | | |
| | | | | | | | TTTTGGGG | | | | | |
| | | | | | | | GA | | | | | |
| OT4-6 | GACTCCTAGCAA | 1803. | 3 | | ACTTTCAGAGCTT | 1804. | CCCACGCT | 1805. | DMSO | 1 | 1 | 1 |
| | AAGAAGAATGG | | | | GGGGCAGGT | | GAAGTGCA | | | | | |
| | | | | | | | ATGGC | | | | | |
| OT4-7 | GAGACTGAGAAG | 1806. | 3 | | CAAAGCATGCCTT | 1807. | GGCTCTTC | 1808. | 1M | 1 | 1 | 1 |
| | AAGAAGAAAGG | | | | TCAGCCG | | GATTTGGC | | betaine, | | | |
| | | | | | | | ACCT | | TD | | | |
| OT4-8 | GAGCCGGAGCAG | 1809. | 3 | | Not optimized | | | | | 1 | 0 | 2 |
| | AAGAAGGAGGG | | | | | | | | | | | |
| OT4-9 | GAGCCTGAGCAG | 1810. | 3 | | GGACTCCCTGCAG | 1811. | AGGAACAC | 1812. | 72° C. | 0 | 0 | 3 |
| | AAGGAGAAGGG | | | | CTCCAGC | | AGGCCAGG | | Anneal, | | | |
| | | | | | | | CTGG | | 6% | | | |
| | | | | | | | | | DMSO | | | |
| OT4-10 | GAGGCCGAGCAG | 1813. | 3 | | CCCTTTAGGCACC | 1814. | CCGACCTT | 1815. | DMSO | 0 | 1 | 2 |
| | AAGAAAGACGG | | | | TTCCCCA | | CATCCCTC | | | | | |
| | | | | | | | CTGG | | | | | |
| OT4-11 | GAGTAAGAGAAG | 1816. | 3 | | TGATTCTGCCTTA | 1817. | TGGGCTCT | 1818. | DMSO | 0 | 3 | 0 |
| | AAGAAGAAGGG | | | | GAGTCCCAGGT | | GTGTCCCT | | | | | |
| | | | | | | | ACCCA | | | | | |
| OT4-12 | GAGTAGGAGGAG | 1819. | 3 | | Not optimized | | | | | 2 | 1 | 0 |
| | AAGAAGAAAGG | | | | | | | | | | | |
| OT4-13 | GAGTCCGGGAAG | 1820. | 3 | | AGGCAGGAGAGCA | 1821. | ACCCTGAC | 1822. | DMSO | 0 | 1 | 2 |
| | GAGAAGAAAGG | | | | AGCAGGT | | TACTGACT | | | | | |
| | | | | | | | GACCGCT | | | | | |
| OT4-14 | GATTCCTACCAG | 1823. | 3 | | CTCCCCATTGCGA | 1824. | AGAGGCAT | 1825. | DMSO | 1 | 2 | 0 |
| | AAGAAGAATGG | | | | CCCGAGG | | TGACTTGG | | | | | |
| | | | | | | | AGCACCT | | | | | |
| OT4-15 | GCGACAGAGCAG | 1826. | 3 | | CTGGAGCCCAGCA | 1827. | CCTCAGGG | 1828. | DMSO | 1 | 2 | 0 |
| | AAGAAGAAGGG | | | | GGAAGGC | | AGGGGGCC | | | | | |
| | | | | | | | TGAT | | | | | |
| OT4-16 | AAATCCAACCAG | 1829. | 4 | | ACTGTGGGCGTTG | 1830. | AGGTCGGT | 1831. | DMSO | 1 | 0 | 3 |
| | AAGAAGAAAGG | | | | TCCCCAC | | GCAGGGTT | | | | | |
| | | | | | | | TAAGGA | | | | | |
| OT4-17 | AAGTCTGAGGAC | 1832. | 4 | | GGCGCTCCCTTTT | 1833. | CGTCACCC | 1834. | DMSO | 2 | 0 | 2 |
| | AAGAAGAATGG | | | | TCCCTTTGT | | ATCGTCTC | | | | | |
| | | | | | | | GTGGA | | | | | |
| OT4-18 | AAGTTGGAGCAG | 1835. | 4 | | TGCCATCTATAGC | 1836. | GCATCTTG | 1837. | DMSO | 1 | 0 | 3 |
| | GAGAAGAAGGG | | | | AGCCCCCT | | CTAACCGT | | | | | |
| | | | | | | | ACTTCTTC | | | | | |
| | | | | | | | TGA | | | | | |
| OT4-19 | AATACAGAGCAG | 1838. | 4 | | GTGGAGACGCTAA | 1839. | GCTCCTGG | 1840. | DMSO | 1 | 2 | 1 |
| | AAGAAGAATGG | | | | ACCTGTGAGGT | | CCTCTTCC | | | | | |
| | | | | | | | TACAGC | | | | | |
| OT4-20 | AGGTACTAGCAG | 1841. | 4 | | CCGAACTTCTGCT | 1842. | CCAAGTCA | 1843. | DMSO | 0 | 2 | 2 |
| | AAGAAGAAAGG | | | | GAGCTTGATGC | | ATGGGCAA | | | | | |
| | | | | | | | CAAGGGA | | | | | |
| OT4-21 | AGGTGCTAGCAG | 1844. | 4 | | Not optimized | | | | | 1 | 1 | 2 |
| | AAGAAGAAGGG | | | | | | | | | | | |
| OT4-22 | AGGTGGGAGCAG | 1845. | 4 | | TGCCCCCAAGACC | 1846. | ATGGCAGG | 1847. | DMSO | 2 | 0 | 2 |
| | AAGAAGAAGGG | | | | TTTCTCC | | CAGAGGAG | | | | | |
| | | | | | | | GAAG | | | | | |
| OT4-23 | CAAACGGAGCAG | 1848. | 4 | | GGGTGGGGCCATT | 1849. | CTGGGGCC | 1850. | DMSO | 3 | 0 | 1 |
| | AAGAAGAAAGG | | | | GTGGGTT | | AGGGTTTC | | | | | |
| | | | | | | | TGCC | | | | | |
| OT4-24 | CACTCTGAGGAG | 1851. | 4 | | TGGAGAACATGAG | 1852. | TCCTTCTG | 1853. | DMSO | 3 | 0 | 1 |
| | AAGAAGAAAGG | | | | AGGCTTGCAA | | TAGGCAAT | | | | | |
| | | | | | | | GGGAACAA | | | | | |
| OT4-25 | CAGTCATGGCAG | 1854. | 4 | | GCCACATGGTAGA | 1855. | GGCAGATT | 1856. | 1M | 1 | 2 | 1 |
| | AAGAAGAAAGG | | | | AGTCGGC | | TCCCCCAT | | betaine, | | | |
| | | | | | | | GCTG | | TD | | | |
| OT4-26 | CCGTCCCAGCAG | 1857. | 4 | | TGTACACCCCAAG | 1858. | AAGGGGAG | 1859. | DMSO | 3 | 1 | 0 |
| | TAGAAGAATGG | | | | TCCTCCC | | TGTGCAAG | | | | | |
| | | | | | | | CCTC | | | | | |
| OT4-27 | GTCTGCGATCAG | 1860. | 4 | | AGGTCTGGCTAGA | 1861. | AGTCCAAC | 1862. | DMSO | 3 | 1 | 0 |
| | AAGAAGAAAGG | | | | GATGCAGCA | | ACTCAGGT | | | | | |
| | | | | | | | GAGACCCT | | | | | |
| OT4-28 | TAATCCAATCAG | 1863. | 4 | | CCAAGAGGACCCA | 1864. | GGGTATGG | 1865. | DMSO | 0 | 2 | 2 |
| | AAGAAGAAGGG | | | | GCTGTTGGA | | AATTCTGG | | | | | |
| | | | | | | | ATTAGCAG | | | | | |
| | | | | | | | AGC | | | | | |
| OT4-29 | TATACGGAGCAG | 1866. | 4 | | ACCATCTCTTCAT | 1867. | ACACTGTG | 1868. | DMSO | 2 | 2 | 0 |
| | AAGAAGAATGG | | | | TGATGAGTCCCAA | | AGTATGCT | | | | | |
| | | | | | | | TGGCGT | | | | | |
| OT4-30 | ACTTCCCTGCAG | 1869. | 5 | | GGCTGCGGGGAGA | 1870. | TCGGATGC | 1871. | DMSO | 2 | 2 | 1 |
| | AAGAAGAAAGG | | | | TGAGCTC | | TTTTCCAC | | | | | |
| | | | | | | | AGGGCT | | | | | |
| OT4-31 | AGGACTGGGCAG | 1872. | 5 | | TCTTCCAGGAGGG | 1873. | CCAATCCT | 1874. | DMSO | 1 | 0 | 4 |
| | AAGAAGAAGGG | | | | CAGCTCC | | GAGCTCCT | | | | | |
| | | | | | | | ACAAGGCT | | | | | |
| OT4-32 | AGGTTGGAGAAG | 1875. | 5 | | GAGCTGCACTGGA | 1876. | TGCTGGTT | 1877. | DMSO | 1 | 1 | 3 |
| | AAGAAGAAGGG | | | | TGGCACT | | AAGGGGTG | | | | | |
| | | | | | | | TTTTGGA | | | | | |
| OT4-33 | AGTTCAGAGCAG | 1878. | 5 | | TCTGGGAAGGTGA | 1879. | TGGGGGAC | 1880. | DMSO | 0 | 2 | 3 |
| | GAGAAGAATGG | | | | GGAGGCCA | | AATGGAAA | | | | | |
| | | | | | | | AGCAATGA | | | | | |
| OT4-34 | ATGACACAGCAG | 1881. | 5 | | CTTGCTCCCAGCC | 1882. | AGCCCTTG | 1883. | DMSO | 3 | 1 | 1 |
| | AAGAAGAAGGG | | | | TGACCCC | | CCATGCAG | | | | | |
| | | | | | | | GACC | | | | | |
| OT4-35 | ATGACAGAGAAG | 1884. | 5 | | GGGATTTTTATCT | 1885. | AACCACAG | 1886. | DMSO | 2 | 2 | 1 |
| | AAGAAGAAAGG | | | | GTTGGGTGCGAA | | ATGTACCC | | | | | |
| | | | | | | | TCAAAGCT | | | | | |
| OT4-36 | CCGCCCCTGCAG | 1887. | 5 | | ACCCATCAGGACC | 1888. | TCTGGAAC | 1889. | 72 C. | 3 | 1 | 1 |
| | AAGAAGAACGG | | | | GCAGCAC | | CTGGGAGG | | Anneal, | | | |
| | | | | | | | CGGA | | 3% | | | |
| | | | | | | | | | DMSO | | | |
| OT4-37 | GCAGGAGAGCAG | 1890. | 5 | | CGTCCCTCACAGC | 1891. | CCTCCTTG | 1892. | DMSO | 1 | 3 | 1 |
| | AAGAAGAAAGG | | | | CAGCCTC | | GGCCTGGG | | | | | |
| | | | | | | | GTTC | | | | | |
| OT4-38 | GTTCAAGAGCAG | 1893. | 5 | | CCCTCTGCAAGGT | 1894. | AGATGTTC | 1895. | DMSO | 1 | 3 | 1 |
| | AAGAAGAATGG | | | | GGAGTCTCC | | TGTCCCCA | | | | | |
| | | | | | | | GGCCT | | | | | |
| OT4-39 | GTTTTGAAGCAG | 1896. | 5 | | GGCTTCCACTGCT | 1897. | TGCCGCTC | 1898. | DMSO | 2 | 1 | 2 |
| | AAGAAGAAAGG | | | | GAAGGCCT | | CACATACC | | | | | |
| | | | | | | | CTCC | | | | | |
| OT4-40 | TATGGCAAGCAG | 1899. | 5 | | AGCATTGCCTGTC | 1900. | AGCACCTA | 1901. | DMSO | 1 | 3 | 1 |
| | AAGAAGAAAGG | | | | GGGTGATGT | | TTGGACAC | | | | | |
| | | | | | | | TGGTTCTC | | | | | |
| | | | | | | | T | | | | | |
| OT4-41 | TGGTGGGATCAG | 1902. | 5 | | TCTAGAGCAGGGG | 1903. | TGGAGATG | 1904. | DMSO | 2 | 2 | 1 |
| | AAGAAGAAAGG | | | | CACAATGC | | GAGCCTGG | | | | | |
| | | | | | | | TGGGA | | | | | |
| OT4-42 | ACCCACGGGCAG | 1905. | 6 | | GGTCTCAGAAAAT | 1906. | CCCACAGA | 1907. | DMSO | 1 | 2 | 3 |
| | AAGAAGAAGGG | | | | GGAGAGAAAGCAC | | AACCTGGG | | | | | |
| | | | | | G | | CCCT | | | | | |
| OT4-43 | ACTCCTGATCAG | 1908. | 6 | | GGTTGCTGATACC | 1909. | TGGGTCCT | 1910. | DMSO | 0 | 3 | 3 |
| | AAGAAGAAGGG | | | | AAAACGTTTGCCT | | CTCCACCT | | | | | |
| | | | | | | | CTGCA | | | | | |
| OT4-44 | ACTGATGAGCAG | 1911. | 6 | | ACTCTCCTTAAGT | 1912. | CAGAATCT | 1913. | DMSO | 0 | 4 | 2 |
| | AAGAAGAAAGG | | | | ACTGATATGGCTG | | TGCTCTGT | | | | | |
| | | | | | T | | TGCCCA | | | | | |
| OT4-45 | ATTTTAGTGCAG | 1914. | 6 | | Not optimized | | | | | 2 | 2 | 2 |
| | AAGAAGAAAGG | | | | | | | | | | | |
| OT4-46 | ATTTTAGTGCAG | 1915. | 6 | | Not optimized | | | | | 2 | 2 | 2 |
| | AAGAAGAAAGG | | | | | | | | | | | |
| OT4-47 | CCATGGCAGCAG | 1916. | 6 | | CAATGCCTGCAGT | 1917. | TCCCAAGA | 1918. | DMSO | 4 | 1 | 1 |
| | AAGAAGAAGGG | | | | CCTCAGGA | | GAAAACTC | | | | | |
| | | | | | | | TGTCCTGA | | | | | |
| | | | | | | | CA | | | | | |
| OT4-48 | CCATTACAGCAG | 1919. | 6 | | GCATTGGCTGCCC | 1920. | TGGCTGTG | 1921. | DMSO | 2 | 2 | 2 |
| | AAGAAGAAGGG | | | | AGGGAAA | | CTGGGCTG | | | | | |
| | | | | | | | TGTT | | | | | |
| OT4-49 | CGAGGCGGGCAG | 1922. | 6 | | CCACAAGCCTCAG | 1923. | ACAGGTGC | 1924. | DMSO | 2 | 1 | 3 |
| | AAGAAGAAAGG | | | | CCTACCCG | | CAAAACAC | | | | | |
| | | | | | | | TGCCT | | | | | |
| OT4-50 | TCATTGCAGCAG | 1925. | 6 | TCATTGCAGCAGAA | GCCTCTTGCAAAT | 1926. | CGATCAGT | 1927. | DMSO | 2/1 | 2/3 | 2 |
| | AAGAAGAAAGG | | | GAAGAAAGG | GAGACTCCTTTT | | CCCCTGGC | | | | | |
| | | | | TCATTGTAGCAGAA | | | GTCC | | | | | |
| | | | | GAAGAAAGG (SEQ | | | | | | | | |
| | | | | ID NO: 2230) | | | | | | | | |
| OT4-51 | TCTCCAGGGCAG | 1928. | 6 | | TCCCAGAATCTGC | 1929. | AGGGGTTT | 1930. | DMSO | 0 | 4 | 2 |
| | AAGAAGAAAGG | | | | CTCCGCA | | CCAGGCAC | | | | | |
| | | | | | | | ATGGG | | | | | |
| | | 1931. | | | | 1932. | | 1933. | | | | |
| Target 5 | GTCATCTTAGTC | 1934. | 0 | | TCCTAAAAATCAG | 1935. | AAAGTGTT | 1936. | DMSO | | | |
| | ATTACCTGAGG | | | | TTTTGAGATTTAC | | AGCCAACA | | | | | |
| | | | | | TTCC | | TACAGAAG | | | | | |
| | | | | | | | TCAGGA | | | | | |
| OT5-1 | GGTATCTAAGTC | 1937. | 3 | GGTATCTAAGTCAT | ACATCTGGGGAAA | 1938. | TGTCTGAG | 1939. | DMSO | 1/2 | 1 | 1 |
| | ATTACCTGTGG | | | TACCTGTGG (SEQ | GCAAAAGTCAACA | | TATCTAGG | | | | | |
| | | | | ID NO: 2231) | | | CTAAAAGT | | | | | |
| | | | | GGTATCTAAGTCAA | | | GGT | | | | | |
| | | | | TACCTGTGG (SEQ | | | | | | | | |
| | | | | ID NO: 2232) | | | | | | | | |
| OT5-2 | GTAATATTAGTC | 1940. | 3 | | ACGATCTTGCTTC | 1941. | AGTGCTTT | 1942. | DMSO | 0 | 3 | 0 |
| | ATTACCGGTGG | | | | ATTTCCCTGTACA | | GTGAACTG | | | | | |
| | | | | | | | AAAAGCAA | | | | | |
| | | | | | | | ACA | | | | | |
| OT5-3 | GTAATCTGAGTC | 1943. | 3 | | GCACCTTGGTGCT | 1944. | GGGCAACT | 1945. | DMSO | 1 | 2 | 0 |
| | ATTTCCTGGGG | | | | GCTAAATGCC | | GAACAGGC | | | | | |
| | | | | | | | ATGAATGG | | | | | |
| OT5-4 | GTCATCCTAGTC | 1946. | 3 | | AACTGTCCTGCAT | 1947. | GGTGCACC | 1948. | DMSO | 1 | 1 | 1 |
| | ATTTACTGGGG | | | | CCCCGCC | | TGGATCCA | | | | | |
| | | | | | | | CCCA | | | | | |
| OT5-5 | GTCATCCTAGTG | 1949. | 3 | | Not optimized | 1950. | | 1951. | | 1 | 1 | 1 |
| | CTTACCTGAGG | | | | | | | | | | | |
| OT5-6 | GTCATCTGAGGC | 1952. | 3 | | CATCACCCTCCAC | 1953. | ACCACTGC | 1954. | 72 C. | 0 | 3 | 0 |
| | ATTAACTGGGG | | | | CAGGCCC | | TGCAGGCT | | Anneal, | | | |
| | | | | | | | CCAG | | 3% | | | |
| | | | | | | | | | DMSO | | | |
| OT5-7 | AATATGTTAGTC | 1955. | 4 | | Not optimized | | | | | 2 | 0 | 2 |
| | ATTACCTGAGG | | | | | | | | | | | |
| OT5-8 | ATAAACGTAGTC | 1956. | 4 | | CCTGACCCGTGGT | 1957. | TGGTGCGT | 1958. | 72 C. | 1 | 2 | 1 |
| | ATTACCTGGGG | | | | TCCCGAC | | GGTGTGTG | | Anneal, | | | |
| | | | | | | | TGGT | | 3% | | | |
| | | | | | | | | | DMSO | | | |
| OT5-9 | ATCATCATCGTC | 1959. | 4 | | TGGGAACATTGGA | 1960. | CCATGTGA | 1961. | DMSO | 1 | 1 | 2 |
| | ATTATCTGGGG | | | | GAAGTTTCCTGA | | CTACTGGG | | | | | |
| | | | | | | | CTGCCC | | | | | |
| OT5-10 | ATCATTTTACTC | 1962. | 4 | | AGCCTTGGCAAGC | 1963. | GGTTCTCT | 1964. | DMSO | 1 | 0 | 3 |
| | ATTACTTGTGG | | | | AACTCCCT | | CTCTCAGA | | | | | |
| | | | | | | | AAAGAAAG | | | | | |
| | | | | | | | AGG | | | | | |
| OT5-11 | ATCATTTTAGTC | 1965. | 4 | | GGCAGCGGACTTC | 1966. | GCCAGAGG | 1967. | DMSO | 1 | 0 | 3 |
| | ATCTCCTGTGG | | | | AGAGCCA | | CTCTCAGC | | | | | |
| | | | | | | | AGTGC | | | | | |
| OT5-12 | CACAGCTTAGTC | 1968. | 4 | | CCAGCCTGGTCAA | 1969. | ACTGTGCC | 1970. | DMSO | 2 | 1 | 1 |
| | ATCACCTGGGG | | | | TATGGCA | | CAGCCCCA | | | | | |
| | | | | | | | TATT | | | | | |
| OT5-13 | CCCAGCTTAGTC | 1971. | 4 | | ATGCCAACACTCG | 1972. | CGGGTTGT | 1973. | DMSO | 2 | 1 | 1 |
| | ATTAGCTGTGG | | | | AGGGGCC | | GGCACCGG | | | | | |
| | | | | | | | GTTA | | | | | |
| OT5-14 | CTCACCTTTGTC | 1974. | 4 | | TTGCTCTAGTGGG | 1975. | AGAGTTCA | 1976. | DMSO | 3 | 0 | 1 |
| | ATTTCCTGAGG | | | | GAGGGGG | | GGCATGAA | | | | | |
| | | | | | | | AAGAAGCA | | | | | |
| | | | | | | | ACA | | | | | |
| OT5-15 | CTCATTTTATTC | 1977. | 4 | | AGCTGAAGATAGC | 1978. | TGCAATTT | 1979. | DMSO | 1 | 1 | 2 |
| | ATTGCCTGGGG | | | | AGTGTTTAAGCCT | | GAGGGGCT | | | | | |
| | | | | | | | CTCTTCA | | | | | |
| OT5-16 | CTCTCCTTAGTC | 1980. | 4 | | AGTCACTGGAGTA | 1981. | TGCCAGCC | 1982. | DMSO | 2 | 0 | 2 |
| | ACTACCTGAGG | | | | AGCCTGCCT | | AAAAGTTG | | | | | |
| | | | | | | | TTAGTGTG | | | | | |
| | | | | | | | T | | | | | |
| OT5-17 | CTTATCTCTGTC | 1983. | 4 | | GGGTCTCCCTCAG | 1984. | TGTGTGGT | 1985. | DMSO | 2 | 0 | 2 |
| | ATTACCTGGGG | | | | TGCCCTG | | AGGGAGCA | | | | | |
| | | | | | | | AAACGACA | | | | | |
| OT5-18 | GACAGCTCCGTC | 1986. | 4 | | TGGGGGCTGTTAA | 1987. | TGACCACA | 1988. | DMSO | 1 | 2 | 1 |
| | ATTACCTGGGG | | | | GAGGCACA | | CACACCCC | | | | | |
| | | | | | | | CACG | | | | | |
| OT5-19 | GCCACCTCAGTC | 1989. | 4 | | TCAAAACAGATTG | 1990. | TGTGTTTT | 1991. | DMSO | 1 | 0 | 3 |
| | ATTAGCTGGGG | | | | ACCAAGGCCAAAT | | TAAGCTGC | | | | | |
| | | | | | | | ACCCCAGG | | | | | |
| OT5-20 | GGAATCTTACTC | 1992. | 4 | | TCTGGCACCAGGA | 1993. | GCACGCAG | 1994. | DMSO | 1 | 2 | 1 |
| | ATTACTTGGGG | | | | CTGATTGTACA | | CTGACTCC | | | | | |
| | | | | | | | CAGA | | | | | |
| OT5-21 | GTGGCCTCAGTC | 1995. | 4 | | Not optimized | | | | | 1 | 0 | 3 |
| | ATTACCTGCGG | | | | | | | | | | | |
| OT5-22 | GTTGTTTTAGTG | 1996. | 4 | | AGCATCTGTGATA | 1997. | ACCAGGGC | 1998. | DMSO | 1 | 0 | 3 |
| | ATTACCTGAGG | | | | CCCTACCTGTCT | | TGCCACAG | | | | | |
| | | | | | | | AGTC | | | | | |
| OT5-23 | TACATCTTAGTC | 1999. | 4 | | TAGTCTTGTTGCC | 2000. | CTCGGCCC | 2001. | DMSO | 1 | 2 | 1 |
| | CTCACCTGTGG | | | | CAGGCTG | | CTGAGAGT | | | | | |
| | | | | | | | TCAT | | | | | |
| OT5-24 | TCCATCTCACTC | 2002. | 4 | TCCATCTCACTCAT | CTGCAACCAGGGC | 2003. | GAGCAGCA | 2004. | DMSO | 1 | 1 | 2 |
| | ATTACCTGAGG | | | TACCTGAGG (SEQ | CCTTACC | | GCAAAGCC | | | | | |
| | | | | ID NO: 2233) | | | ACCG | | | | | |
| | | | | TCCATCTCACTCAT | | | | | | | | |
| | | | | TACCTGATG (SEQ | | | | | | | | |
| | | | | ID NO: 2234) | | | | | | | | |
| OT5-25 | TTCATCCTAGTC | 2005. | 4 | | GCCTGGAGAGCAA | 2006. | AGCCGAGA | 2007. | DMSO | 1 | 1 | 2 |
| | AACACCTGGGG | | | | GCCTGGG | | CAATCTGC | | | | | |
| | | | | | | | CCCG | | | | | |
| OT5-26 | TTTATATTAGTG | 2008. | 4 | TTTATATTAGTGAT | AGTGAAACAAACA | 2009. | GGCAGGTC | 2010. | No | 1 | 2 | 1 |
| | ATTACCTGTGG | | | TACCTGCGG (SEQ | AGCAGCAGTCTGA | | TGACCAGT | | DMSO | | | |
| | | | | ID NO: 2235) | | | GGGG | | TD | | | |
| OT5-27 | AACGTGTAAGTC | 2011. | 5 | | AGGCTCAGAGAGG | 2012. | TGAGTAGA | 2013. | DMSO | 3 | 0 | 2 |
| | ATTACCTGAGG | | | | TAAGCAATGGA | | CAGAAATG | | | | | |
| | | | | | | | TTACCGGT | | | | | |
| | | | | | | | GTT | | | | | |
| OT5-28 | AAGATCACAGTC | 2014. | 5 | | TCAGAGATGTTAA | 2015. | AGTGAACC | 2016. | DMSO | 3 | 0 | 2 |
| | ATTACCTGGGG | | | | AGCCTTGGTGGG | | AAGGGAAT | | | | | |
| | | | | | | | GGGGGA | | | | | |
| OT5-29 | AGAATATTAGTC | 2017. | 5 | | TGTGCTTTCTGGG | 2018. | CACCTCAG | 2019. | DMSO | 0 | 4 | 1 |
| | CTTACCTGGGG | | | | GTAGTGGCA | | CCCTGTAG | | | | | |
| | | | | | | | TCCTGG | | | | | |
| OT5-30 | AGCAGATTAGTG | 2020. | 5 | | CCATTGGGTGACT | 2021. | GCCACTGT | 2022. | 1M | 1 | 3 | 1 |
| | ATTACCTGGGG | | | | GAATGCACA | | CCCCAGCC | | betaine, | | | |
| | | | | | | | TATT | | TD | | | |
| OT5-31 | AGTAGCTTAGTG | 2023. | 5 | | ACCAAGAAAGTGA | 2024. | TGAGATGG | 2025. | DMSO | 1 | 2 | 2 |
| | ATTACCTGGGG | | | | AAAGGAAACCC | | CATACGAT | | | | | |
| | | | | | | | TTACCCA | | | | | |
| OT5-32 | CACGGCTTACTC | 2026. | 5 | | AGGGTGGGGACTG | 2027. | TGGCATCA | 2028. | DMSO | 3 | 1 | 1 |
| | ATTACCTGGGG | | | | AAAGGAGCT | | CTCAGAGA | | | | | |
| | | | | | | | TTGGAACA | | | | | |
| | | | | | | | CA | | | | | |
| OT5-33 | CATATGTTAGGC | 2029. | 5 | | ACCAGTGCTGTGT | 2030. | TCCTATGG | 2031. | DMSO | 3 | 1 | 1 |
| | ATTACCTGGGG | | | | GACCTTGGA | | GAGGGGAG | | | | | |
| | | | | | | | GCTTCT | | | | | |
| OT5-34 | CATTTCTTAGTC | 2032. | 5 | | CCAGGTGTGGTGG | 2033. | GCATACGG | 2034. | 68 C., | 4 | 0 | 1 |
| | ATTTCCTGAGG | | | | TTCATGAC | | CAGTAGAA | | 3% | | | |
| | | | | | | | TGAGCC | | DMSO | | | |
| OT5-35 | TGCAGCTAACTC | 2035. | 5 | | CAGGCGCTGGGTT | 2036. | CCTTCCTG | 2037. | DMSO | 2 | 3 | 0 |
| | ATTACCTGCGG | | | | CTTAGCCT | | GGCCCCAT | | | | | |
| | | | | | | | GGTG | | | | | |
| OT5-36 | TTGCTTTTAGTT | 2038. | 5 | | TGGGGTCCAAGAT | 2039. | TGAAACTG | 2040. | DMSO | 1 | 2 | 2 |
| | ATTACCTGGGG | | | | GTCCCCT | | CTTGATGA | | | | | |
| | | | | | | | GGTGTGGA | | | | | |
| OT5-37 | AACTTGAAAGTC | 2041. | 6 | | GCTGGGCTTGGTG | 2042. | ACTTGCAA | 2043. | DMSO | 5 | 0 | 1 |
| | ATTACCTGTGG | | | | GTATATGC | | AGCTGATA | | | | | |
| | | | | | | | ACTGACTG | | | | | |
| | | | | | | | A | | | | | |
| OT5-38 | AAGGTCACAGTC | 2044. | 6 | | AGTTGGTGTCACT | 2045. | CGCAGCGC | 2046. | DMSO | 3 | 0 | 3 |
| | ATTACCTGGGG | | | | GACAATGGGA | | ACGAGTTC | | | | | |
| | | | | | | | ATCA | | | | | |
| OT5-39 | AATGTCTTCATC | 2047. | 6 | | AGAGGAGGCACAA | 2048. | GGCTGGGG | 2049. | DMSO | 1 | 1 | 4 |
| | ATTACCTGAGG | | | | TTCAACCCCT | | AGGCCTCA | | | | | |
| | | | | | | | CAAT | | | | | |
| OT5-40 | AGATGCTTGGTC | 2050. | 6 | | GGGAAAGTTTGGG | 2051. | AGGACAAG | 2052. | DMSO | 1 | 3 | 2 |
| | ATTACCTGTGG | | | | AAAGTCAGCA | | CTACCCCA | | | | | |
| | | | | | | | CACC | | | | | |
| OT5-41 | AGTAGATTAGTT | 2053. | 6 | | TGGTGCATCAAAG | 2054. | TCATTCCA | 2055. | DMSO | 0 | 3 | 3 |
| | ATTACCTGGGG | | | | GGTTGCTTCT | | GCACGCCG | | | | | |
| | | | | | | | GGAG | | | | | |
| OT5-42 | AGTAGGTTAGTA | 2056. | 6 | | CCCAGGCTGCCCA | 2057. | TGGAGTAA | 2058. | DMSO | 1 | 3 | 2 |
| | ATTACCTGGGG | | | | TCACACT | | GTATACCT | | | | | |
| | | | | | | | TGGGGACC | | | | | |
| | | | | | | | T | | | | | |
| OT5-43 | CAAATGAGAGTC | 2059. | 6 | | TCAGTGCCCCTGG | 2060. | TGTGCAAA | 2061. | DMSO | 4 | 2 | 0 |
| | ATTACCTGAGG | | | | GTCCTCA | | TACCTAGC | | | | | |
| | | | | | | | ACGGTGC | | | | | |
| OT5-44 | CATGTCTGAATC | 2062. | 6 | | AGCACTCCCTTTT | 2063. | ACTGAAGT | 2064. | DMSO | 2 | 1 | 3 |
| | ATTACCTGAGG | | | | GAATTTTGGTGCT | | CCAGCCTC | | | | | |
| | | | | | | | TTCCATTT | | | | | |
| | | | | | | | CA | | | | | |
| OT5-45 | CCTGACTTGGTC | 2065. | 6 | | GAAACCGGTCCCT | 2066. | GGGGAGTA | 2067. | DMSO | 2 | 0 | 4 |
| | ATTACCTGTGG | | | | GGTGCCA | | GAGGGTAG | | | | | |
| | | | | | | | TGTTGCC | | | | | |
| OT5-46 | CGTGCATTAGTC | 2068. | 6 | | TTGCGGGTCCCTG | 2069. | AGGTGCCG | 2070. | DMSO | 1 | 2 | 3 |
| | ATTACCTGAGG | | | | TGGAGTC | | TGTTGTGC | | | | | |
| | | | | | | | CCAA | | | | | |
| Target 6 | GGAATCCCTTCT | 2071. | 0 | | GCCCTACATCTGC | 2072. | GGGCCGGG | 2073. | DMSO | | | |
| | GCAGCACCTGG | | | | TCTCCCTCCA | | AAAGAGTT | | | | | |
| | | | | | | | GCTG | | | | | |
| OT6-1 | GGAACCCCGTCT | 2074. | 2 | | TTGGAGTGTGGCC | 2075. | ACCTCTCT | 2076. | DMSO | 0 | 1 | 1 |
| | GCAGCACCAGG | | | | CGGGTTG | | TTCTCTGC | | | | | |
| | | | | | | | CTCACTGT | | | | | |
| OT6-2 | GGAACACCTTCT | 2077. | 3 | | CACACCATGCTGA | 2078. | GCAGTACG | 2079. | DMSO | 1 | 1 | 1 |
| | GCAGCTCCAGG | | | | TCCAGGC | | GAAGCACG | | | | | |
| | | | | | | | AAGC | | | | | |
| OT6-3 | GGAAGCTCTGCT | 2080. | 3 | | CTCCAGGGCTCGC | 2081. | CTGGGCTC | 2082. | DMSO | 0 | 2 | 1 |
| | GCAGCACCTGG | | | | TGTCCAC | | TGCTGGTT | | | | | |
| | | | | | | | CCCC | | | | | |
| OT6-4 | GGAATATCTTCT | 2083. | 3 | | CTGTGGTAGCCGT | 2084. | CCCCATAC | 2085. | DMSO | 0 | 2 | 1 |
| | GCAGCCCCAGG | | | | GGCCAGG | | CACCTCTC | | | | | |
| | | | | | | | CGGGA | | | | | |
| OT6-5 | GGAATCACTTTT | 2086. | 3 | | GGTGGCGGGACTT | 2087. | CCAGCGTG | 2088. | 1M | 0 | 1 | 2 |
| | ACAGCACCAGG | | | | GAATGAG | | TTTCCAAG | | betaine, | | | |
| | | | | | | | GGAT | | TD | | | |
| OT6-6 | GGAATCCCCTCT | 2089. | 3 | GGAATCCCCTCTCC | CCAGAGGTGGGGC | 2090. | TTTCCACA | 2091. | DMSO | 1 | 1 | 1/2 |
| | CCAGCCCCTGG | | | AGCCCCTGG (SEQ | CCTGTGA | | CTCAGTTC | | | | | |
| | | | | ID NO:2236) | | | TGCAGGA | | | | | |
| | | | | GGAATCCCCTCTCC | | | | | | | | |
| | | | | AGCCTCTGG (SEQ | | | | | | | | |
| | | | | ID NO: 2237) | | | | | | | | |
| OT6-7 | GGAATCTCTTCT | 2092. | 3 | GGAATCTCTTCCTT | TGTGACTGGTTGT | 2093. | GCAGTGTT | 2094. | 1M | 0 | 1 | 5 |
| | TCAGCATCTGG | | | GGCATCTGG (SEQ | CCTGCTTTCCT | | TTGTGGTG | | betaine, | | | |
| | | | | ID NO: 2238) | | | ATGGGCA | | TD | | | |
| OT6-8 | GGAATTGCTTCT | 2095. | 3 | | CTGGCCAAGGGGT | 2096. | TGGGACCC | 2097. | DMSO | 1 | 0 | 2 |
| | GCAGCGCCAGG | | | | GAGTGGG | | CAGCAGCC | | | | | |
| | | | | | | | AATG | | | | | |
| OT6-9 | GGACTCCCCTCT | 2098. | 3 | | ACGGTGTGCTGGC | 2099. | ACAGTGCT | 2100. | DMSO | 1 | 1 | 1 |
| | GCAGCAGCTGG | | | | TGCTCTT | | GACCGTGC | | | | | |
| | | | | | | | TGGG | | | | | |
| OT6-10 | GGAGTCCCTCCT | 2101. | 3 | | TGGTTTGGGCCTC | 2102. | TGCCTCCC | 2103. | DMSO | 0 | 0 | 3 |
| | ACAGCACCAGG | | | | AGGGATGG | | ACAAAAAT | | | | | |
| | | | | | | | GTCTACCT | | | | | |
| OT6-11 | GGAGTCCCTCCT | 2104. | 3 | | TGGTTTGGGCCTC | 2105. | ACCCCTTA | 2106. | DMSO | 0 | 0 | 3 |
| | ACAGCACCAGG | | | | AGGGATGG | | TCCCAGAA | | | | | |
| | | | | | | | CCCATGA | | | | | |
| OT6-12 | GGCATCCATTCT | 2107. | 3 | | TCCAAGTCAGCGA | 2108. | TGGGAGCT | 2109. | DMSO | 0 | 3 | 0 |
| | GCAGCCCCTGG | | | | TGAGGGCT | | GTTCCTTT | | | | | |
| | | | | | | | TTGGCCA | | | | | |
| OT6-13 | GGCTTCCCTTCT | 2110. | 3 | | CACCCCTCTCAGC | 2111. | GCTAGAGG | 2112. | DMSO | 1 | 2 | 0 |
| | GCAGCCCCAGG | | | | TTCCCAA | | GTCTGCTG | | | | | |
| | | | | | | | CCTT | | | | | |
| OT6-14 | TGAATCCCATCT | 2113. | 3 | | AGACCCCTTGGCC | 2114. | CTTGCTCT | 2115. | DMSO | 2 | 1 | 0 |
| | CCAGCACCAGG | | | | AAGCACA | | CACCCCGC | | | | | |
| | | | | | | | CTCC | | | | | |
| OT6-15 | AAAATACCTTCT | 2116. | 4 | | ACATGTGGGAGGC | 2117. | TCTCACTT | 2118. | DMSO | 0 | 1 | 3 |
| | GCAGTACCAGG | | | | GGACAGA | | TGCTGTTA | | | | | |
| | | | | | | | CCGATGTC | | | | | |
| | | | | | | | G | | | | | |
| OT6-16 | AAAATCCCTTCT | 2119. | 4 | | GGACGACTGTGCC | 2120. | AGTGCCCA | 2121. | 72 C. | 0 | 1 | 3 |
| | TCAACACCTGG | | | | TGGGACA | | GAGTGTTG | | Anneal, | | | |
| | | | | | | | TAACTGCT | | 3% | | | |
| | | | | | | | | | DMSO | | | |
| OT6-17 | ACACTCCCTCCT | 2122. | 4 | | GGAGAGCTCAGCG | 2123. | CAGCGTGG | 2124. | DMSO | 1 | 1 | 2 |
| | GCAGCACCTGG | | | | CCAGGTC | | CCCGTGGG | | | | | |
| | | | | | | | AATA | | | | | |
| OT6-18 | ACCATCCCTCCT | 2125. | 4 | | GCTGAAGTGCTCT | 2126. | ACCCCACT | 2127. | DMSO | 1 | 1 | 2 |
| | GCAGCACCAGG | | | | GGGGTGCT | | GTGGATGA | | | | | |
| | | | | | | | ATTGGTAC | | | | | |
| | | | | | | | C | | | | | |
| OT6-19 | AGAGGCCCCTCT | 2128. | 4 | | TCGGGGTGCACAT | 2129. | TTGCCTCG | 2130. | DMSO | 0 | 1 | 3 |
| | GCAGCACCAGG | | | | GGCCATC | | CAGGGGAA | | | | | |
| | | | | | | | GCAG | | | | | |
| OT6-20 | AGGATCCCTTGT | 2131. | 4 | | CTCGTGGGAGGCC | 2132. | AGCCACCA | 2133. | DMSO | 2 | 0 | 2 |
| | GCAGCTCCTGG | | | | AACACCT | | ACACATAC | | | | | |
| | | | | | | | CAGGCT | | | | | |
| OT6-21 | CCACTCCTTTCT | 2134. | 4 | | GCATGCCTTTAAT | 2135. | AGGATTTC | 2136. | DMSO | 2 | 1 | 1 |
| | GCAGCACCCGG | | | | CCCGGCT | | AGAGTGAT | | | | | |
| | | | | | | | GGGGCT | | | | | |
| OT6-22 | GAAGGCCCTTCA | 2137. | 4 | | CGCCCAGCCACAA | 2138. | GCAAATTT | 2139. | DMSO | 1 | 1 | 2 |
| | GCAGCACCTGG | | | | AGTGCAT | | CTGCACCT | | | | | |
| | | | | | | | ACTCTAGG | | | | | |
| | | | | | | | CCT | | | | | |
| OT6-23 | GATATCCCTTCT | 2140. | 4 | | AGCTCACAAGAAT | 2141. | GCAGTCAC | 2142. | DMSO | 1 | 1 | 2 |
| | GTATCACCTGG | | | | TGGAGGTAACAGT | | CCTTCACT | | | | | |
| | | | | | | | GCCTGT | | | | | |
| OT6-24 | GGGTCCGCTTCT | 2143. | 4 | | AAACTGGGCTGGG | 2144. | GGGGCTAA | 2145. | DMSO | 2 | 0 | 2 |
| | GCAGCACCTGG | | | | CTTCCGG | | GGCATTGT | | | | | |
| | | | | | | | CAGACCC | | | | | |
| OT6-25 | GTCTCCCCTTCT | 2146. | 4 | | GCAGGTAGGCAGT | 2147. | TCTCCTGC | 2148. | 1M | 1 | 2 | 1 |
| | GCAGCACCAGG | | | | CTGGGGC | | CTCAGCCT | | betaine, | | | |
| | | | | | | | CCCA | | TD | | | |
| OT6-26 | GTCTCCCCTTCT | 2149. | 4 | | GCAGGTAGGCAGT | 2150. | TCTCCTGC | 2151. | 1M | 1 | 2 | 1 |
| | GCAGCACCAGG | | | | CTGGGGC | | CTCAGCCT | | betaine, | | | |
| | | | | | | | CCCA | | TD | | | |
| OT6-27 | GTCTCCCCTTCT | 2152. | 4 | | GCAGGTAGGCAGT | 2153. | TCTCCTGC | 2154. | 1M | 1 | 2 | 1 |
| | GCAGCACCAGG | | | | CTGGGGC | | CTCAGCCT | | betaine, | | | |
| | CCCA | | | | | | | | TD | | | |
| OT6-28 | TCATTCCCGTCT | 2155. | 4 | | GCTCTGGGGTAGA | 2156. | GGCCTGTC | 2157. | DMSO | 2 | 2 | 0 |
| | GCAGCACCCGG | | | | AGGAGGC | | AACCAACC | | | | | |
| | | | | | | | AACC | | | | | |
| OT6-29 | TGCACCCCTCCT | 2158. | 4 | | TGACATGTTGTGT | 2159. | AAATCCTG | 2160. | DMSO | 0 | 2 | 2 |
| | GCAGCACCAGG | | | | GCTGGGC | | CAGCCTCC | | | | | |
| | | | | | | | CCTT | | | | | |
| OT6-30 | TGCATACCCTCT | 2161. | 4 | | TCCTGGTGAGATC | 2162. | TCCTCCCC | 2163. | DMSO | 0 | 3 | 1 |
| | GCAGCACCAGG | | | | GTCCACAGGA | | ACTCAGCC | | | | | |
| | | | | | | | TCCC | | | | | |
| OT6-31 | TGCATGGCTTCT | 2164. | 4 | | TCCTAATCCAAGT | 2165. | AGGGACCA | 2166. | DMSO | 2 | 2 | 0 |
| | GCAGCACCAGG | | | | CCTTTGTTCAGAC | | GCCACTAC | | | | | |
| | | | | | A | | CCTTCA | | | | | |
| OT6-32 | AATATTCCCTCT | 2167. | 5 | | GGGACACCAGTTC | 2168. | GGGGGAGA | 2169. | DMSO | 1 | 0 | 4 |
| | GCAGCACCAGG | | | | CTTCCAT | | TTGGAGTT | | | | | |
| | | | | | | | CCCC | | | | | |
| OT6-33 | ACCATTTCTTCT | 2170. | 5 | | ACACCACTATCAA | 2171. | TCTGCCTG | 2172. | DMSO | 1 | 1 | 3 |
| | GCAGCACCTGG | | | | GGCAGAGTAGGT | | GGGTGCTT | | | | | |
| | | | | | | | TCCC | | | | | |
| OT6-34 | AGCTCCCATTCT | 2173. | 5 | | CTGGGAGCGGAGG | 2174. | GCCCCGAC | 2175. | DMSO | 1 | 2 | 2 |
| | GCAGCACCCGG | | | | GAAGTGC | | AGATGAGG | | | | | |
| | | | | | | | CCTC | | | | | |
| OT6-35 | CAGATTCCTGCT | 2176. | 5 | CAGATTACTGCTGC | CGGGTCTCGGAAT | 2177. | ACCCAGGA | 2178. | DMSO | 1 | 2 | 3 |
| | GCAGCACCGGG | | | AGCACCGGG (SEQ | GCCTCCA | | ATTGCCAC | | | | | |
| | | | | ID NO: 2239) | | | CCCC | | | | | |
| OT6-36 | CCAAGAGCTTCT | 2179. | 5 | | TTGCTGTGGTCCC | 2180. | GCAGACAC | 2181. | DMSO | 3 | 2 | 0 |
| | GCAGCACCTGG | | | | GGTGGTG | | TAGAGCCC | | | | | |
| | | | | | | | GCCC | | | | | |
| OT6-37 | CCCAGCCCTGCT | 2182. | 5 | | GGTGTGGTGACAG | 2183. | ACCTGCGT | 2184. | DMSO | 2 | 3 | 0 |
| | GCAGCACCCGG | | | | GTCGGGT | | CTCTGTGC | | | | | |
| | | | | | | | TGCA | | | | | |
| OT6-38 | CCCCTCCCTCCT | 2185. | 5 | | CTCCCAGGACAGT | 2186. | CCTGGCCC | 2187. | DMSO | 2 | 2 | 1 |
| | GCAGCACCGGG | | | | GCTCGGC | | CATGCTGC | | | | | |
| | | | | | | | CTG | | | | | |
| OT6-39 | CTACTGACTTCT | 2188. | 5 | | TGCGTAGGTTTTG | 2189. | AGGGAATG | 2190. | DMSO | 2 | 3 | 0 |
| | GCAGCACCTGG | | | | CCTCTGTGA | | ATGTTTTC | | | | | |
| | | | | | | | CACCCCCT | | | | | |
| OT6-40 | CTCCTCCCTCCT | 2191. | 5 | | CTCCGCAGCCACC | 2192. | TGCATTGA | 2193. | DMSO | 1 | 3 | 1 |
| | GCAGCACCTGG | | | | GTTGGTA | | CGTACGAT | | | | | |
| | | | | | | | GGCTCA | | | | | |
| OT6-41 | TCTGTCCCTCCT | 2194. | 5 | | ACCTGCAGCATGA | 2195. | ACCTGAGC | 2196. | DMSO | 2 | 1 | 2 |
| | GCAGCACCTGG | | | | ACTCTCGCA | | AACATGAC | | | | | |
| | | | | | | | TCACCTGG | | | | | |
| OT6-42 | ACACAAACTTCT | 2197. | 6 | ACACAAACTTCTGC | TCTCCAGTTTCTT | 2198. | ACCATTGG | 2199. | 1M | 3/2 | 3 | 1 |
| | GCAGCACCTGG | | | AGCACCTGG | GCTCTCATGG | | TGAACCCA | | betaine, | | | |
| | | | | ACACAAACTTCTGC | | | GTCA | | TD | | | |
| | | | | AGCACGTGG (SEQ | | | | | | | | |
| | | | | ID NO: 2240) | | | | | | | | |
| OT6-43 | ACTGTCATTTCT | 2200. | 6 | | TGGGGTGGTGGTC | 2201. | TCAGCTAT | 2202. | DMSO | 2 | 1 | 3 |
| | GCAGCACCTGG | | | | TTGAATCCA | | AACCTGGG | | | | | |
| | | | | | | | ACTTGTGC | | | | | |
| | | | | | | | T | | | | | |
| OT6-44 | ACTTTATCTTCT | 2203. | 6 | | AGCAGCCAGTCCA | 2204. | CCCTTTCA | 2205. | DMSO | 3 | 1 | 2 |
| | GCAGCACCTGG | | | | GTGTCCTG | | TCGAGAAC | | | | | |
| | | | | | | | CCCAGGG | | | | | |
| OT6-45 | ATCCTTTCTTCT | 2206. | 6 | | TGGACGCTGCTGG | 2207. | GAGGTCTC | 2208. | DMSO | 0 | 3 | 3 |
| | GCAGCACCTGG | | | | GAGGAGA | | GGGCTGCT | | | | | |
| | | | | | | | CGTG | | | | | |
| OT6-46 | CACCACCGTTCT | 2209. | 6 | | AGGTTTGCACTCT | 2210. | TGGGGTGA | 2211. | DMSO | 3 | 2 | 1 |
| | GCAGCACCAGG | | | | GTTGCCTGG | | TTGGTTGC | | | | | |
| | | | | | | | CAGGT | | | | | |
| OT6-47 | CATGTGGCTTCT | 2212. | 6 | | TCTTCCTTTGCCA | 2213. | TGCAGGAA | 2214. | DMSO | 4 | 0 | 2 |
| | GCAGCACCTGG | | | | GGCAGCACA | | TAGCAGGT | | | | | |
| | | | | | | | ATGAGGAG | | | | | |
| | | | | | | | T | | | | | |
| OT6-48 | CATTTTCTTTCT | 2215. | 6 | | GGACGCCTACTGC | 2216. | GCCCTGGC | 2217. | DMSO | 3 | 0 | 3 |
| | GCAGCACCTGG | | | | CTGGACC | | AGCCCATG | | | | | |
| | | | | | | | GTAC | | | | | |
| OT6-49 | CTCTGTCCTTCT | 2218. | 6 | | AGGCAGTCATCGC | 2219. | GGTCCCAC | 2220. | DMSO | 2 | 3 | 1 |
| | GCAGCACCTGG | | | | CTTGCTA | | CTTCCCCT | | | | | |
| | | | | | | | ACAA | | | | | |
| OT6-50 | CTGTACCCTCCT | 2221. | 6 | | Not optimized | | | | | 3 | 1 | 2 |
| | GCAGCACCAGG | | | | | | | | | | | |
| OT6-51 | TTGAGGCCGTCT | 2222. | 6 | | CCCCAGCCCCCAC | 2223. | CAGCCCAG | 2224. | DMSO | 1 | 4 | 1 |
| | GCAGCACCGGG | | | | CAGTTTC | | GCCACAGC | | | | | |
| | | | | | | | TTCA | | | | | |

[0176] Sanger Sequencing for Quantifying Frequencies of Indel Mutations

[0177] Purified PCR products used for T7EI assay were ligated into a Zero Blunt TOPO vector (Life Technologies) and transformed into chemically competent Top 10 bacterial cells. Plasmid DNAs were isolated and sequenced by the Massachusetts General Hospital (MGH) DNA Automation Core, using an M13 forward primer (5′-GTAAAACGACGGCCAG-3′) (SEQ ID NO:1059).

[0178] Restriction Digest Assay for Quantifying Specific Alterations Induced by HDR with ssODNs

[0179] PCR reactions of specific on-target sites were performed using Phusion high-fidelity DNA polymerase (New England Biolabs). The VEGF and EMX1 loci were amplified using a touchdown PCR program ((98° C., 10 s; 72-62° C., −1° C./cycle, 15 s; 72° C., 30 s)×10 cycles, (98° C., 10 s; 62° C., 15 s; 72° C., 30 s)×25 cycles), with 3% DMSO. The primers used for these PCR reactions are listed in Table E. PCR products were purified by Ampure XP beads (Agencourt) according to the manufacturer's instructions. For detection of the BamHI restriction site encoded by the ssODN donor template, 200 ng of purified PCR products were digested with BamHI at 37° C. for 45 minutes. The digested products were purified by Ampure XP beads (Agencourt), eluted in 20 ul 0.1×EB buffer and analyzed and quantified using a QIAXCEL capillary electrophoresis system.

[0180] TruSeq Library Generation and Sequencing Data Analysis

[0181] Locus-specific primers were designed to flank on-target and potential and verified off-target sites to produce PCR products ˜300 bp to 400 bps in length. Genomic DNAs from the pooled duplicate samples described above were used as templates for PCR. All PCR products were purified by Ampure XP beads (Agencourt) per the manufacturer's instructions. Purified PCR products were quantified on a QIAXCEL capillary electrophoresis system. PCR products for each locus were amplified from each of the pooled duplicate samples (described above), purified, quantified, and then pooled together in equal quantities for deep sequencing. Pooled amplicons were ligated with dual-indexed Illumina TruSeq adaptors as previously described (Fisher et al., 2011). The libraries were purified and run on a QIAXCEL capillary electrophoresis system to verify change in size following adaptor ligation. The adapter-ligated libraries were quantified by qPCR and then sequenced using Illumina MiSeq 250 bp paired-end reads performed by the Dana-Farber Cancer Institute Molecular Biology Core Facilities. We analyzed between 75,000 and 1,270,000 (average ˜422,000) reads for each sample. The TruSeq reads were analyzed for rates of indel mutagenesis as previously described (Sander et al., 2013). Specificity ratios were calculated as the ratio of observed mutagenesis at an on-target locus to that of a particular off-target locus as determined by deep sequencing. Fold-improvements in specificity with tru-RGNs for individual off-target sites were calculated as the specificity ratio observed with tru-gRNAs to the specificity ratio for that same target with the matched full-length gRNA. As mentioned in the text, for some of the off-target sites, no indel mutations were detected with tru-gRNAs. In these cases, we used a Poisson calculator to determine with a 95% confidence that the upper limit of the actual number of mutated sequences would be three in number. We then used this upper bound to estimate the minimum fold-improvement in specificity for these off-target sites.

### Example 2a. Truncated gRNAs can Efficiently Direct Cas9-Mediated Genome Editing in Human Cells

[0182] To test the hypothesis that gRNAs truncated at their 5′ end might function as efficiently as their full-length counterparts, a series of progressively shorter gRNAs were initially constructed as described above for a single target site in the EGFP reporter gene, with the following sequence: 5′-GGCGAGGGCGATGCCACCTAcGG-3′ (SEQ ID NO:2241). This particular EGFP site was chosen because it was possible to make gRNAs to it with 15, 17, 19, and 20 nts of complementarity that each have a G at their 5′ end (required for efficient expression from the U6 promoter used in these experiments). Using a human cell-based reporter assay in which the frequency of RGN-induced indels could be quantified by assessing disruption of a single integrated and constitutively expressed enhanced green fluorescent protein (EGFP) gene (Example 1 and Fu et al., 2013; Reyon et al., 2012) (FIG. 2B), the abilities of these variable-length gRNAs to direct Cas9-induced indels at the target site were measured.

[0183] As noted above, gRNAs bearing longer lengths of complementarity (21, 23, and 25 nts) exhibit decreased activities relative to the standard full-length gRNA containing 20 nts of complementary sequence (FIG. 2H), a result that matches those recently reported by others (Ran et al., Cell 2013). However, gRNAs bearing 17 or 19 nts of target complementarity showed activities comparable to or higher than the full-length gRNA, while a shorter gRNA bearing only 15 nts of complementary failed to show significant activity (FIG. 2H).

[0184] To test the generality of these initial findings, full-length gRNAs and matched gRNAs bearing 18, 17 and/or 16 nts of complementarity to four additional EGFP reporter gene sites (EGFP sites #1, #2, #3, and #4; FIG. 3A) were assayed. At all four target sites, gRNAs bearing 17 and/or 18 nts of complementarity functioned as efficiently as (or, in one case, more efficiently than) their matched full-length gRNAs to induce Cas9-mediated disruption of EGFP expression (FIG. 3A). However, gRNAs with only 16 nts of complementarity showed significantly decreased or undetectable activities on the two sites for which they could be made (FIG. 3A). For each of the different sites tested, we transfected the same amounts of the full-length or shortened gRNA expression plasmid and Cas9 expression plasmid. Control experiments in which we varied the amounts of Cas9 and truncated gRNA expression plasmids transfected for EGFP sites #1, #2, and #3 suggested that shortened gRNAs function equivalently to their full-length counterparts (FIG. 3E (bottom) and 3F (bottom)) and that therefore we could use the same amounts of plasmids when making comparisons at any given target site. Taken together, these results provide evidence that shortened gRNAs bearing 17 or 18 nts of complementarity can generally function as efficiently as full-length gRNAs and hereafter the truncated gRNAs with these complementarity lengths are referred to as “tru-gRNAs” and RGNs using these tru-gRNAs as “tru-RGNs”.

[0185] Whether tru-RGNs could efficiently induce indels on chromatinized endogenous gene targets was tested next. Tru-gRNAs were constructed for seven sites in three endogenous human genes (VEGFA, EMX1, and CLTA), including four sites that had previously been targeted with standard full-length gRNAs in three endogenous human genes: VEGFA site 1, VEGFA site 3, EMX1, and CTLA (Example 1 and Fu et al., 2013; Hsu et al., 2013; Pattanayak et al., 2013) (FIG. 3B). (It was not possible to test a tru-gRNA for VEGFA site 2 from Example 1, because this target sequence does not have the G at either position 17 or 18 of the complementarity region required for gRNA expression from a U6 promoter.) Using a well-established T7 Endonuclease I (T7EI) genotyping assay (Reyon et al., 2012) as described above, the Cas9-mediated indel mutation frequencies induced by each of these various gRNAs at their respective target sites was quantified in human U2OS.EGFP cells. For all five of the seven four sites, tru-RGNs robustly induced indel mutations with efficiencies comparable to those mediated by matched standard RGNs (FIG. 3B). For the two sites on which tru-RGNs showed lower activities than their full-length counterparts, we note that the absolute rates of mutagenesis were still high (means of 13.3% and 16.6%) at levels that would be useful for most applications. Sanger sequencing for three of these target sites (VEGFA sites 1 and 3 and EMX1) confirmed that indels induced by tru-RGNs originate at the expected site of cleavage and that these mutations are essentially indistinguishable from those induced with standard RGNs (FIG. 3C and FIGS. 7A-D).

[0186] We also found that tru-gRNAs bearing a mismatched 5′ G and an 18 nt complementarity region could efficiently direct Cas9-induced indels whereas those bearing a mismatched 5′ G and a 17 nt complementarity region showed lower or undetectable activities compared with matched full-length gRNAs (FIG. 7E), consistent with our findings that a minimum of 17 nts of complementarity is required for efficient RGN activity.

[0187] To further assess the genome-editing capabilities of tru-RGNs, their abilities to induce precise sequence alterations via HDR with ssODN donor templates were tested. Previous studies have shown that Cas9-induced breaks can stimulate the introduction of sequence from a homologous ssODN donor into an endogenous locus in human cells (Cong et al., 2013; Mali et al., 2013c; Ran et al., 2013; Yang et al., 2013). Therefore, the abilities were compared of matched full-length and tru-gRNAs targeted to VEGFA site 1 and to the EMX1 site to introduce a BamHI restriction site encoded on homologous ssODNs into these endogenous genes. At both sites, tru-RGNs mediated introduction of the BamHI site with efficiencies comparable to those seen with standard RGNs harboring their full-length gRNA counterparts (FIG. 3D). Taken together, this data demonstrate that tru-RGNs can function as efficiently as standard RGNs to direct both indels and precise HDR-mediated genome editing events in human cells.

### Example 2b. Tru-RGNs Exhibit Enhanced Sensitivities to gRNA/DNA Interface Mismatches

[0188] Having established that tru-RGNs can function efficiently to induce on-target genome editing alterations, whether these nucleases would show greater sensitivity to mismatches at the gRNA/DNA interface was tested. To assess this, a systematic series of variants was constructed for the tru-gRNAs that were previously tested on EGFP sites #1, #2, and #3 (FIG. 3A above). The variant gRNAs harbor single Watson-Crick substitutions at each position within the complementarity region (with the exception of the 5′ G required for expression from the U6 promoter) (FIG. 5A). The human cell-based EGFP disruption assay was used to assess the relative abilities of these variant tru-gRNAs and an analogous set of matched variant full-length gRNAs made to the same three sites as described in Example 1 to direct Cas9-mediated indels. The results show that for all three EGFP target sites, tru-RGNs generally showed greater sensitivities to single mismatches than standard RGNs harboring matched full-length gRNAs (compare bottom and top panels of FIG. 5A). The magnitude of sensitivity varied by site, with the greatest differences observed for sites #2 and #3, whose tru-gRNAs harbored 17 nts of complementarity.

[0189] Encouraged by the increased sensitivity of tru-RGNs to single nucleotide mismatches, we next sought to examine the effects of systematically mismatching two adjacent positions at the gRNA-DNA interface. We therefore made variants of the tru-gRNAs targeted to EGFP target sites #1, #2, and #3, each bearing Watson-Crick transversion substitutions at two adjacent nucleotide positions (FIG. 5B). As judged by the EGFP disruption assay, the effects of adjacent double mismatches on RGN activity were again substantially greater for tru-gRNAs than for the analogous variants made in Example 1 for matched full-length gRNAs targeted to all three EGFP target sites (compare bottom to top panels in FIG. 5B). These effects appeared to be site-dependent with nearly all of the double-mismatched tru-gRNAs for EGFP sites #2 and #3 failing to show an increase in EGFP disruption activities relative to a control gRNA lacking a complementarity region and with only three of the mismatched tru-gRNA variants for EGFP site #1 showing any residual activities (FIG. 5B). In addition, although double mutations generally showed greater effects on the 5′ end with full-length gRNAs, this effect was not observed with tru-gRNAs. Taken together, our data suggest that tru-gRNAs exhibit greater sensitivities than full-length gRNAs to single and double Watson-Crick transversion mismatches at the gRNA-DNA interface.

### Example 2c. Tru-RGNs Targeted to Endogenous Genes Show Improved Specificities in Human Cells

[0190] The next experiments were performed to determine whether tru-RGNs might show reduced genomic off-target effects in human cells relative to standard RGNs harboring full-length gRNA counterparts. We examined matched full-length and tru-gRNAs targeted to VEGFA site 1, VEGFA site 3, and EMX1 site 1 (described in FIG. 3B above) because previous studies (see Example 1 and Fu et al., 2013; Hsu et al., 2013) had defined 13 bona fide off-target sites for the full-length gRNAs targeted to these sites. (We were unable to test a tru-gRNA for VEGFA site 2 from our original study 6 because this target sequence does not have the G at either position 17 or 18 of the complementarity region required for efficient gRNA expression from a U6 promoter.) Strikingly, we found that tru-RGNs showed substantially reduced mutagenesis activity in human U2OS.EGFP cells relative to matched standard RGNs at all 13 of these bona fide off-target sites as judged by T7EI assay (Table 3A); for 11 of the 13 off-target sites, the mutation frequency with tru-RGNs dropped below the reliable detection limit of the T7EI assay (2-5%) (Table 3A). We observed similar results when these matched pairs of standard and tru-RGNs were tested at the same 13 off-target sites in another human cell line (FT-HEK293 cells) (Table 3A).

[0191] To quantify the magnitude of specificity improvement observed with tru-RGNs, we measured off-target mutation frequencies using high-throughput sequencing, which provides a more sensitive method for detecting and quantifying low frequency mutations than the T7EI assay. We assessed a subset of 12 of the 13 bona fide off-target sites for which we had seen decreased mutation rates with tru-gRNAs by T7EI assay (for technical reasons, we were unable to amplify the required shorter amplicon for one of the sites) and also examined an additional off-target site for EMX1 site 1 that had been identified by another group 7 (FIG. 6A). For all 13 off-target sites we tested, tru-RGNs showed substantially decreased absolute frequencies of mutagenesis relative to matched standard RGNs (FIG. 6A and Table 3B) and yielded improvements in specificity of as much as 5000-fold or more relative to their standard RGN counterparts (FIG. 6B). For two off-target sites (OT1-4 and OT1-11), it was difficult to quantify the on-target to off-target ratios for tru-RGNs because the absolute number and frequency of indel mutations induced by tru-RGNs fell to background or near-background levels. Thus, the ratio of on-target to off-target rates would calculate to be infinite in these cases. To address this, we instead identified the maximum likely indel frequency with a 95% confidence level for these sites and then used this conservative estimate to calculate the minimum likely magnitude of specificity improvement for tru-RGNs relative to standard RGNs for these off-targets. These calculations suggest tru-RGNs yield improvements of ˜10,000-fold or more at these sites (FIG. 6B).

[0192] To further explore the specificity of tru-RGNs, we examined their abilities to induce off-target mutations at additional closely related sites in the human genome. For the tru-gRNAs to VEGFA site 1 and EMX1, which each possess 18 nts of target site complementarity, we computationally identified all additional sites in the human genome mismatched at one or two positions within the complementarity region (not already examined above in Table 3A) and a subset of all sites mismatched at three positions among which we favored mismatches in the 5′ end of the site as described in Example 1. For the tru-gRNA to VEGFA site 3, which possesses 17 nts of target site complementarity, we identified all sites mismatched at one position and a subset of all sites mismatched at two positions among which mismatches in the 5′ end were favored (again not already examined in Table 3A). This computational analysis yielded a total of 30, 30, and 34 additional potential off-target sites for the tru-RGNs targeted to VEGFA site 1, VEFGA site 3, and the EMX1 site, respectively, which we then assessed for mutations using T7EI assay in human U2OS.EGFP and HEK293 cells in which the RGNs had been expressed.

[0193] Strikingly, the three tru-RGNs to VEGFA site 1, VEFGA site 3, and EMX1 did not induce detectable Cas9-mediated indel mutations at 93 of the 94 potential off-target sites examined in human U2OS.EGFP cells or at any of the 94 potential off-target sites in human HEK293 cells (Table 3C). For the one site at which off-target mutations were seen, whether the standard RGN with a full-length gRNA targeted to VEGFA site 1 could also mutagenize this same off-target site was examined; it induced detectable mutations albeit at a slightly lower frequency (FIG. 6C). The lack of improvement observed with shortening of the gRNA at this off-target site can be understood by comparing the 20 and 18 nt sequences for the full-length and tru-gRNAs, which shows that the two additional bases in the full-length 20 nt target are both mismatched (FIG. 6C). In summary, based on this survey of 94 additional potential off-target sites, shortening of the gRNA does not appear to induce new high-frequency off-target mutations.

[0194] Deep sequencing of a subset of the 30 most closely matched potential off-target sites from this set of 94 site (i.e.—those with one or two mismatches) showed either undetectable or very low rates of indel mutations (Table 3D) comparable to what we observed at other previously identified off-target sites (Table 3B). We conclude that tru-RGNs generally appear to induce either very low or undetectable levels of mutations at sites that differ by one or two mismatches from the on-target site. This contrasts with standard RGNs for which it was relatively easy to find high-frequency off-target mutations at sites that differed by as many as five mismatches (see Example 1).

TABLE 3A
On- and off-target mutation frequencies of matched tru-RGNs and standard RGNs
targeted to endogenous genes in human U2OS.EGFP and HEK293 cells

| | | SEQ | Indel mutation frequency | | | SEQ | Indel mutation frequency | | |
|---|---|---|---|---|---|---|---|---|---|
| Target | | ID | (%) ± s.e.m. | | | ID | (%) ± s.e.m. | | |
| ID | 20mer Target | NO: | u2OS.EGFP | HEK293 | NO: | NO: | u2OS.EGFP | HEK293 | Gene |
| T1 | GGGTGGGGGGAGTTTGCTCCtGG | 2242. | 23.69 ± 1.99 | 6.98 ± 1.33 | GTGGGGGGAGTTTGCTCCtGG | 2243. | 23.93 ± 4.37 | 8.34 ± 0.01 | VEGFA |
| OT1-3 | GGATGGAGGGAGTTTGCTCCtGG | 2244. | 17.25 ± 2.97 | 7.26 ± 0.62 | ATGGAGGGAGTTTGCTCCtGG | 2245. | N.D. | N.D. | IGDCC3 |
| OT1-4 | GGGAGGGTGGAGTTTGCTCCtGG | 2246. | 6.23 ± 0.20 | 2.66 ± 0.30 | GAGGGTGGAGTTTGCTCCtGG | 2247. | N.D. | N.D. | LOC116437 |
| OT1-6 | CGGGGGAGGGAGTTTGCTCCtGG | 2248. | 3.73 ± 0.23 | 1.41 ± 0.07 | GGGGAGGGAGTTTGCTCCtGG | 2249. | N.D. | N.D. | CACNA2D |
| OT1-11 | GGGGAGGGGAAGTTTGCTCCtGG | 2250. | 10.4 ± 0.7 | 3.61 ± 0.02 | GGAGGGGAAGTTTGCTCCtGG | 2251. | N.D. | N.D. | |
| T3 | GGTGAGTGAGTGTGTGCGTGtGG | 2252. | 54.08 ± 1.02 | 22.97 ± 0.17 | GAGTGAGTGTGTGCGTGtGG | 2253. | 50.49 ± 1.25 | 20.05 ± 0.01 | VEGFA |
| OT3-1 | GGTGAGTGAGTGTGTGTGTGaGG | 2254. | 6.16 ± 0.98 | 6.02 ± 0.11 | GAGTGAGTGTGTGTGTGaGG | 2255. | N.D. | N.D. | (abParts) |
| OT3-2 | AGTGAGTGAGTGTGTGTGTGgGG | 2256. | 19.64 ± 1.06 | 11.29 ± 0.27 | GAGTGAGTGTGTGTGTGgGG | 2257. | 5.52 ± 0.25 | 3.41 ± 0.07 | MAX |
| OT3-4 | GCTGAGTGAGTGTATGCGTGtGG | 2258. | 7.95 ± 0.11 | 4.50 ± 0.02 | GAGTGAGTGTATGCGTGtGG | 2259. | 1.69 ± 0.26 | 1.27 ± 0.10 | |
| OT3-9 | GGTGAGTGAGTGCGTGCGGGtGG | 2260. | N.D. | 1.09 ± 0.17 | GAGTGAGTGCGTGCGGGtGG | 2261. | N.D. | N.D. | TPCN2 |
| OT3-17 | GTTGAGTGAATGTGTGCGTGaGG | 2262. | 1.85 ± 0.08 | N.D. | GAGTGAATGTGTGCGTGaGG | 2263. | N.D. | N.D. | SLIT1 |
| OT3-18 | TGTGGGTGAGTGTGTGCGTGaGG | 2264. | 6.16 ± 0.56 | 6.27 ± 0.09 | GGGTGAGTGTGTGCGTGaGG | 2265. | N.D. | N.D. | COMDA |
| OT3-20 | AGAGAGTGAGTGTGTGCATGaGG | 2266. | 10.47 ± 1.08 | 4.38 ± 0.58 | GAGTGAGTGTGTGCATGaGG | 2267. | N.D. | N.D. | |
| T4 | GAGTCCGAGCAGAAGAAGAAgGG | 2268. | 41.56 ± 0.20 | 12.65 ± 0.31 | GTCCGAGCAGAAGAAGAAgGG | 2269. | 43.01 ± 0.87 | 17.25 ± 0.64 | EMX1 |
| OT4-1 | GAGTTAGAGCAGAAGAAGAAaGG | 2270. | 19.26 ± 0.73 | 4.14 ± 0.66 | GTTAGAGCAGAAGAAGAAaGG | 2271. | N.D. | N.D. | HCN1 |
| OT- | GAGTCTAAGCAGAAGAAGAAgAG | 2272. | 4.37 ± 0.58 | N.D. | GTCTAAGCAGAAGAAGAAgAG | 2273. | N.D. | N.D. | MFAP1 |
| 4_Hsu31 | | | | | | | | | |

Mutation frequencies were measured by T7EI assay. Means of duplicate measurements are shown with error bars representing standard errors of the mean. *Off-target site OT4 53 is the same as EMX1 target 3 OT31 from Hsu et al., 2013.

TABLE 3B
Numbers of wild-type (WT) and indel mutation sequencing reads
from deep sequencing experiments

| | Control | | | tru-RGN | | | Standard RGN | | |
|---|---|---|---|---|---|---|---|---|---|
| Site | Indel | WT | Freq. | Indel | WT | Freq. | Indel | WT | Freq. |
| VEGFA site 1 | 45 | 140169 | 0.03% | 122858 | 242127 | 33.66% | 150652 | 410479 | 26.85% |
| OT1-3 | 0 | 132152 | 0.00% | 1595 | 205878 | 0.77% | 50973 | 144895 | 26.02% |
| OT1-4 | 0 | 133508 | 0.00% | 0 | 223881 | 0.00% | 22385 | 240873 | 8.50% |
| OT1-6 | 3 | 213642 | 0.00% | 339 | 393124 | 0.09% | 24332 | 424458 | 5.21% |
| OT1-11 | 1 | 930894 | 0.00% | 0 | 274779 | 0.00% | 43738 | 212212 | 17.09% |
| VEGFA site 3 | 5 | 212571 | 0.00% | 303913 | 292413 | 50.96% | 183626 | 174740 | 51.24% |
| OT3-2 | 1169 | 162545 | 0.71% | 9415 | 277616 | 3.28% | 26545 | 222482 | 10.66% |
| OT3-4 | 7 | 383006 | 0.00% | 15551 | 1135673 | 1.35% | 42699 | 546203 | 7.25% |
| OT3-9 | 73 | 145367 | 0.05% | 113 | 227874 | 0.05% | 1923 | 168293 | 1.13% |
| OT3-17 | 8 | 460498 | 0.00% | 31 | 1271276 | 0.00% | 16760 | 675708 | 2.42% |
| OT3-18 | 7 | 373571 | 0.00% | 284 | 1275982 | 0.02% | 72354 | 599030 | 10.78% |
| OT3-20 | 5 | 140848 | 0.00% | 593 | 325162 | 0.18% | 30486 | 202733 | 13.07% |
| EMX1 site 1 | 1 | 158838 | 0.00% | 49104 | 102805 | 32.32% | 128307 | 307584 | 29.44% |
| OT4-1 | 10 | 169476 | 0.01% | 13 | 234039 | 0.01% | 47426 | 125683 | 27.40% |
| OT4-52 | 2 | 75156 | 0.00% | 10 | 231090 | 0.00% | 429 | 340201 | 0.13% |
| OT4-53 | 0 | 234069 | 0.00% | 6 | 367811 | 0.00% | 17421 | 351667 | 4.72% |

Freq. = frequency of indel mutations = number of indel sequences/number of wild-type sequences.
Control gRNA = gRNA lacking a complementarity region

TABLE 3C
Indel mutation frequencies at potential off-target sites of tru-RGNs
targeted to endogenous genes in human cells

| | | | | Indel mutation frequency | |
|---|---|---|---|---|---|
| | | SEQ | | (%) ± s.e.m. | |
| Target | | ID | Number of | U2OS.EGFP | HEK293 |
| ID | Target Site + PAM | NO: | mismatches | cells | cells |
| VEGFA | GTGGGGGGAGTTTGCTCCtGG | 2274. | 0 (on-target) | 23.93 ± 4.37 | 8.34 ± 0.01 |
| Site 1 | GTGGGGGGAGTTTGCCCCaGG | 2275. | 1 | Not detected | Not detected |
| | GTGGGGGGTGTTTGCTCCcGG | 2276. | 1 | Not detected | Not detected |
| | GTGGGTGGAGTTTGCTACtGG | 2277. | 2 | Not detected | Not detected |
| | GTGGGGGGAGCTTTCTCCtGG | 2278. | 2 | Not detected | Not detected |
| | GTGGGTGGCGTTTGCTCCaGG | 2279. | 2 | Not detected | Not detected |
| | GTGGAGGGAGCTTGCTCCtGG | 2280. | 2 | 6.88 ± 0.19 | Not detected |
| | GTGGGTGGAGTTTGCTACaGG | 2281. | 2 | Not detected | Not detected |
| | GGGGGGGCAGTTTGCTCCtGG | 2282. | 2 | Not detected | Not detected |
| | GTGTGGGGAATTTGCTCCaGG | 2283. | 2 | Not detected | Not detected |
| | CTGCTGGGAGTTTGCTCCtGG | 2284. | 3 | Not detected | Not detected |
| | TTTGGGAGAGTTTGCTCCaGG | 2285. | 3 | Not detected | Not detected |
| | CTGAGGGCAGTTTGCTCCaGG | 2286. | 3 | Not detected | Not detected |
| | GTAAGGGAAGTTTGCTCCtGG | 2287. | 3 | Not detected | Not detected |
| | GGGGGTAGAGTTTGCTCCaGG | 2288. | 3 | Not detected | Not detected |
| | GGGTGGGGACTTTGCTCCaGG | 2289. | 3 | Not detected | Not detected |
| | GGGGGAGCAGTTTGCTCCaGG | 2290. | 3 | Not detected | Not detected |
| | TTGGGGTTAGTTTGCTCCtGG | 2291. | 3 | Not detected | Not detected |
| | TTGAGGGGAGTCTGCTCCaGG | 2292. | 3 | Not detected | Not detected |
| | CTGGGGTGATTTTGCTCCtGG | 2293. | 3 | Not detected | Not detected |
| | GAGAGGGGAGTTGGCTCCtGG | 2294. | 3 | Not detected | Not detected |
| | TTTGGGGGAGTTTGCCCCaGG | 2295. | 3 | Not detected | Not detected |
| | TTCGGGGGAGTTTGCGCCgGG | 2296. | 3 | Not detected | Not detected |
| | CTCGGGGGAGTTTGCACCaGG | 2297. | 3 | Not detected | Not detected |
| | GTGTTGGGAGTCTGCTCCaGG | 2298. | 3 | Not detected | Not detected |
| | GAGGGGGCAGGTTGCTCCaGG | 2299. | 3 | Not detected | Not detected |
| | GAGGGGAGAGTTTGTTCCaGG | 2300. | 3 | Not detected | Not detected |
| | GTGGCTGGAGTTTGCTGCtGG | 2301. | 3 | Not detected | Not detected |
| | GTCGGGGGAGTGGGCTCCaGG | 2302. | 3 | Not detected | Not detected |
| | GAGGGGGGAGTGTGTTCCgGG | 2303. | 3 | Not detected | Not detected |
| | GTGGTGGGAGCTTGTTCCtGG | 2304. | 3 | Not detected | Not detected |
| | GTGGGGGGTGCCTGCTCCaGG | 2305. | 3 | Not detected | Not detected |
| VEGFA | GAGTGAGTGTGTGCGTGtGG | 2306.0 | (on-target) | 50.49 ± 1.25 | 20.05 ± 0.01 |
| Site 3 | CAGTGAGTGTGTGCGTGtGG | 2307. | 1 | Not detected | Not detected |
| | GTGTGAGTGTGTGCGTGgGG | 2308. | 1 | Not detected | Not detected |
| | GTGTGAGTGTGTGCGTGaGG | 2309. | 1 | Not detected | Not detected |
| | GTGTGAGTGTGTGCGTGtGG | 2310. | 1 | Not detected | Not detected |
| | GAGTGTGTGTGTGCGTGtGG | 2311. | 1 | Not detected | Not detected |
| | GAGTGGGTGTGTGCGTGgGG | 2312. | 1 | Not detected | Not detected |
| | GAGTGACTGTGTGCGTGtGG | 2313. | 1 | Not detected | Not detected |
| | GAGTGAGTGTGTGGGTGgGG | 2314. | 1 | Not detected | Not detected |
| | GAGTGAGTGTGTGTGTGtGG | 2315. | 1 | Not detected | Not detected |
| | GAGTGAGTGTGTGTGTGtGG | 2316. | 1 | Not detected | Not detected |
| | GAGTGAGTGTGTGTGTGgGG | 2317. | 1 | Not detected | Not detected |
| | GAGTGAGTGTGTGTGTGtGG | 2318. | 1 | Not detected | Not detected |
| | GAGTGAGTGTGTGCGCGgGG | 2319. | 1 | Not detected | Not detected |
| | CTGTGAGTGTGTGCGTGaGG | 2320. | 2 | Not detected | Not detected |
| | ATGTGAGTGTGTGCGTGtGG | 2321. | 2 | Not detected | Not detected |
| | GCCTGAGTGTGTGCGTGtGG | 2322. | 2 | Not detected | Not detected |
| | GTGTGTGTGTGTGCGTGtGG | 2323. | 2 | Not detected | Not detected |
| | GTGTGGGTGTGTGCGTGtGG | 2324. | 2 | Not detected | Not detected |
| | GCGTGTGTGTGTGCGTGtGG | 2325. | 2 | Not detected | Not detected |
| | GTGTGTGTGTGTGCGTGgGG | 2326. | 2 | Not detected | Not detected |
| | GTGTGCGTGTGTGCGTGtGG | 2327. | 2 | Not detected | Not detected |
| | GTGTGTGTGTGTGCGTGcGG | 2328. | 2 | Not detected | Not detected |
| | GAGAGAGAGTGTGCGTGtGG | 2329. | 2 | Not detected | Not detected |
| | GAGTGTGTGAGTGCGTGgGG | 2330. | 2 | Not detected | Not detected |
| | GTGTGAGTGTGTGTGTGtGG | 2331. | 2 | Not detected | Not detected |
| | GAGTGTGTGTATGCGTGtGG | 2332. | 2 | Not detected | Not detected |
| | GAGTCAGTGTGTGAGTGaGG | 2333. | 2 | Not detected | Not detected |
| | GAGTGTGTGTGTGAGTGtGG | 2334. | 2 | Not detected | Not detected |
| | GAGTGTGTGTGTGCATGtGG | 2335. | 2 | Not detected | Not detected |
| | GAGTGAGAGTGTGTGTGtGG | 2336. | 2 | Not detected | Not detected |
| | GAGTGAGTGAGTGAGTGaGG | 2337. | 2 | Not detected | Not detected |
| EMX1 | GTCCGAGCAGAAGAAGAAgGG | 2338. | 0 (on-target) | 43.01 ± 0.87 | 17.25 ± 0.64 |
| site | GTCTGAGCAGAAGAAGAAtGG | 2339. | 1 | Not detected | Not detected |
| | GTCCCAGCAGTAGAAGAAtGG | 2340. | 2 | Not detected | Not detected |
| | GTCCGAGGAGAGGAAGAAaGG | 2341. | 2 | Not detected | Not detected |
| | GTCAGAGGAGAAGAAGAAgGG | 2342. | 2 | Not detected | Not detected |
| | GACAGAGCAGAAGAAGAAgGG | 2343. | 2 | Not detected | Not detected |
| | GTGGGAGCAGAAGAAGAAgGG | 2344. | 2 | Not detected | Not detected |
| | GTACTAGCAGAAGAAGAAaGG | 2345. | 2 | Not detected | Not detected |
| | GTCTGAGCACAAGAAGAAtGG | 2346. | 2 | Not detected | Not detected |
| | GTGCTAGCAGAAGAAGAAgGG | 2347. | 2 | Not detected | Not detected |
| | TACAGAGCAGAAGAAGAAtGG | 2348. | 3 | Not detected | Not detected |
| | TACGGAGCAGAAGAAGAAtGG | 2349. | 3 | Not detected | Not detected |
| | AACGGAGCAGAAGAAGAAaGG | 2350. | 3 | Not detected | Not detected |
| | GACACAGCAGAAGAAGAAgGG | 2351. | 3 | Not detected | Not detected |
| | CTGCGATCAGAAGAAGAAaGG | 2352. | 3 | Not detected | Not detected |
| | GACTGGGCAGAAGAAGAAgGG | 2353. | 3 | Not detected | Not detected |
| | TTCCCTGCAGAAGAAGAAaGG | 2354. | 3 | Not detected | Not detected |
| | TTCCTACCAGAAGAAGAAtGG | 2355. | 3 | Not detected | Not detected |
| | CTCTGAGGAGAAGAAGAAaGG | 2356. | 3 | Not detected | Not detected |
| | ATCCAATCAGAAGAAGAAgGG | 2357. | 3 | Not detected | Not detected |
| | GCCCCTGCAGAAGAAGAAcGG | 2358. | 3 | Not detected | Not detected |
| | ATCCAACCAGAAGAAGAAaGG | 2359. | 3 | Not detected | Not detected |
| | GACTGAGAAGAAGAAGAAaGG | 2360. | 3 | Not detected | Not detected |
| | GTGGGATCAGAAGAAGAAaGG | 2361. | 3 | Not detected | Not detected |
| | GACAGAGAAGAAGAAGAAaGG | 2362. | 3 | Not detected | Not detected |
| | GTCATGGCAGAAGAAGAAaGG | 2363. | 3 | Not detected | Not detected |
| | GTTGGAGAAGAAGAAGAAgGG | 2364. | 3 | Not detected | Not detected |
| | GTAAGAGAAGAAGAAGAAgGG | 2365. | 3 | Not detected | Not detected |
| | CTCCTAGCAAAAGAAGAAtGG | 2366. | 3 | Not detected | Not detected |
| | TTCAGAGCAGGAGAAGAAtGG | 2367. | 3 | Not detected | Not detected |
| | GTTGGAGCAGGAGAAGAAgGG | 2368. | 3 | Not detected | Not detected |
| | GCCTGAGCAGAAGGAGAAgGG | 2369. | 3 | Not detected | Not detected |
| | GTCTGAGGACAAGAAGAAtGG | 2370. | 3 | Not detected | Not detected |
| | GTCCGGGAAGGAGAAGAAaGG | 2371. | 3 | Not detected | Not detected |
| | GGCCGAGCAGAAGAAAGAcGG | 2372. | 3 | Not detected | Not detected |
| | GTCCTAGCAGGAGAAGAAgAG | 2373. | 3 | Not detected | Not detected |

TABLE 3D
Frequencies of tru-RGN-induced indel mutations at potential off-
target sites in human U2OS.EGFP as determined by deep sequencing

| On- | | | | | | | | |
|---|---|---|---|---|---|---|---|---|
| target | Off- | | tru-RGN | | | Control | | |
| site | target site sequence | S# | Indel | WT | Freq. | Indel | WT | Freq |
| VEGFA | GTGGGGGGAGTTTGCCCCaGG | 2374. | 1500 | 225640 | 0.66% | 3 | 135451 | 0.00% |
| site 1 | GTGGGGGGTGTTTGCTCCcGG | 2375. | 1552 | 152386 | 1.01% | 0 | 86206 | 0.00% |
| | GTGGGTGGAGTTTGCTACtGG | 2376. | 1 | 471818 | 0.00% | 0 | 199581 | 0.00% |
| | GTGGGTGGAGTTTGCTACaGG | 2377. | 0 | 337298 | 0.00% | 1 | 211547 | 0.00% |
| | GTGGGTGGCGTTTGCTCCaGG | 2378. | 2 | 210174 | 0.00% | 1 | 105531 | 0.00% |
| | GTGTGGGGAATTTGCTCCaGG | 2379. | 673 | 715547 | 0.09% | 1 | 387097 | 0.00% |
| | GTGGGGGGAGCTTTCTCCtGG | 2380. | 5 | 107757 | 0.00% | 1 | 58735 | 0.00% |
| | GGGGGGGCAGTTTGCTCCtGG | 2381. | 1914 | 566548 | 0.34% | 3 | 297083 | 0.00% |
| VEGFA | GTGTGAGTGTGTGCGTGtGG | 2382. | 58 | 324881 | 0.02% | 9 | 122216 | 0.01% |
| site 3 | GTGTGAGTGTGTGCGTGaGG | 2383. | 532 | 194914 | 0.27% | 11 | 73644 | 0.01% |
| | GAGTGGGTGTGTGCGTGgGG | 2384. | 70 | 237029 | 0.03% | 10 | 178258 | 0.01% |
| | GAGTGACTGTGTGCGTGtGG | 2385. | 6 | 391894 | 0.00% | 0 | 239460 | 0.00% |
| | GAGTGAGTGTGTGGGTGgGG | 2386. | 15 | 160140 | 0.01% | 10 | 123324 | 0.01% |
| | GTGTGAGTGTGTGCGTGgGG | 2387. | 19 | 138687 | 0.01% | 1 | 196271 | 0.00% |
| | CAGTGAGTGTGTGCGTGtGG | 2388. | 78 | 546865 | 0.01% | 41 | 355953 | 0.01% |
| | GTGTGAGTGTGTGCGTGtGG | 2389. | 128 | 377451 | 0.03% | 56 | 133978 | 0.04% |
| | GAGTGTGTGTGTGCGTGtGG | 2390. | 913 | 263028 | 0.35% | 78 | 178979 | 0.04% |
| | GAGTGAGTGTGTGTGTGtGG | 2391. | 40 | 106933 | 0.04% | 36 | 58812 | 0.06% |
| | GAGTGAGTGTGTGTGTGtGG | 2392. | 681 | 762999 | 0.09% | 63 | 222451 | 0.03% |
| | GAGTGAGTGTGTGTGTGgGG | 2393. | 331 | 220289 | 0.15% | 100 | 113911 | 0.09% |
| | GAGTGAGTGTGTGTGTGtGG | 2394. | 0 | 35725 | 0.00% | 8 | 186495 | 0.00% |
| | GAGTGAGTGTGTGCGCGgGG | 2395. | 94 | 246893 | 0.04% | 16 | 107623 | 0.01% |
| EMX1 | GTCAGAGGAGAAGAAGAAgGG | 2396. | 0 | 201483 | 0.00% | 4 | 148416 | 0.00% |
| site 1 | GTCAGAGGAGAAGAAGAAgGG | 2397. | 10 | 545662 | 0.00% | 5 | 390884 | 0.00% |
| | GTCTGAGCACAAGAAGAAtGG | 2398. | 2 | 274212 | 0.00% | 0 | 193837 | 0.00% |
| | GTCTGAGCAGAAGAAGAAtGG | 2399. | 440 | 375646 | 0.12% | 10 | 256181 | 0.00% |
| | GACAGAGCAGAAGAAGAAgGG | 2400. | 2 | 212472 | 0.00% | 1 | 158860 | 0.00% |
| | GTACTAGCAGAAGAAGAAaGG | 2401. | 152 | 229209 | 0.07% | 103 | 157717 | 0.07% |
| | GTGGGAGCAGAAGAAGAAgGG | 2402. | 50 | 207401 | 0.02% | 36 | 111183 | 0.03% |
| | GTCCCAGCAGTAGAAGAAtGG | 2403. | 0 | 226477 | 0.00% | 1 | 278948 | 0.00% |

### Example 2d. Tru-gRNAs can be Used with Dual Cas9 Nickases to Efficiently Induce Genome Editing in Human Cells

[0195] tru-gRNAs were tested with the recently described dual Cas9 nickase approach to induce indel mutations. To do this, the Cas9-D10A nickase together with two full-length gRNAs targeted to sites in the human VEGFA gene (VEGFA site 1 and an additional sequence we refer to as VEGFA site 4) were co-expressed in U2OS.EGFP cells (FIG. 4A). As described previously (Ran et al., 2013), this pair of nickases functioned cooperatively to induce high rates of indel mutations at the VEGFA target locus (FIG. 4B). Interestingly, Cas9-D10A nickase co-expressed with only the gRNA targeted to VEGFA site 4 also induced indel mutations at a high frequency, albeit at a rate somewhat lower than that observed with the paired full-length gRNAs (FIG. 4B). Importantly, use of a tru-gRNA for VEGFA site 1 in place of a full-length gRNA did not affect the efficacy of the dual nickase approach to induce indel mutations (FIG. 4B).

[0196] The dual nickase strategy has also been used to stimulate the introduction of specific sequence changes using ssODNs (Mali et al., 2013a; Ran et al., 2013) and so whether tru-gRNAs might be used for this type of alteration was also tested. Paired full-length gRNAs for VEGFA sites 1 and 4 together with Cas9-D10A nickase cooperatively enhanced efficient introduction of a short insertion from a ssODN donor (FIG. 3A) into the VEGFA locus in human U2OS.EGFP cells as expected (FIG. 3C). Again, the efficiency of ssODN-mediated sequence alteration by dual nicking remained equally high with the use of a tru-gRNA in place of the full-length gRNA targeted to VEGFA site 1 (FIG. 3C). Taken together, these results demonstrate that tru-gRNAs can be utilized as part of a dual Cas9 nickase strategy to induce both indel mutations and ssODN-mediated sequence changes, without compromising the efficiency of genome editing by this approach.

[0197] Having established that use of a tru-gRNA does not diminish the on-target genome editing activities of paired nickases, we next used deep sequencing to examine mutation frequencies at four previously identified bona fide off-target sites of the VEGFA site 1 gRNA. This analysis revealed that mutation rates dropped to essentially undetectable levels at all four of these off-target sites when using paired nickases with a tru-gRNA (Table 4). By contrast, neither a tru-RGN (Table 3B) nor the paired nickases with full-length gRNAs (Table 4) was able to completely eliminate off-target mutations at one of these four off-target sites (OT1-3). These results demonstrate that the use of tru-gRNAs can further reduce the off-target effects of paired Cas9 nickases (and vice versa) without compromising the efficiency of on-target genome editing.

TABLE 4
Frequencies of paired nickase-induced indel mutations at on- and
off-target sites of VEGFA site 1 using full-length and tru-gRNAs

| | Paired full-length gRNAs | | | tru-gRNA/full-length gRNA | | | Control | | |
|---|---|---|---|---|---|---|---|---|---|
| Site | Indel | WT | Freq. | Indel | WT | Freq. | Indel | WT | Freq. |
| VEGFA | | | | | | | | | |
| site 1 | 78905 | 345696 | 18.583% | 65754 | 280720 | 18.978% | 170 | 308478 | 0.055% |
| OT1-3 | 184 | 85151 | 0.216% | 0 | 78658 | 0.000% | 2 | 107850 | 0.002% |
| OT1-4 | 0 | 89209 | 0.000% | 1 | 97010 | 0.001% | 0 | 102135 | 0.000% |
| OT1-6 | 2 | 226575 | 0.001% | 0 | 208218 | 0.000% | 0 | 254580 | 0.000% |
| OT1-11 | 0 | 124729 | 0.000% | 0 | 121581 | 0.000% | 0 | 155173 | 0.000% |

### REFERENCES

[0198] Cheng, A. W., Wang, H., Yang, H., Shi, L., Katz, Y., Theunissen, T. W., Rangarajan, S., Shivalila, C. S., Dadon, D. B., and Jaenisch, R. Multiplexed activation of endogenous genes by CRISPR-on, an RNA-guided transcriptional activator system. Cell Res 23, 1163-1171. (2013).
[0199] Cho, S. W., Kim, S., Kim, J. M. & Kim, J. S. Targeted genome engineering in human cells with the Cas9 RNA-guided endonuclease. Nat Biotechnol 31, 230-232 (2013). Cong, L. et al. Multiplex genome engineering using CRISPR/Cas systems. Science 339, 819-823 (2013).
[0200] Cradick, T. J., Fine, E. J., Antico, C. J., and Bao, G. CRISPR/Cas9 systems targeting beta-globin and CCR5 genes have substantial off-target activity. Nucleic Acids Res. (2013).
[0201] Dicarlo, J. E. et al. Genome engineering in Saccharomyces cerevisiae using CRISPR-Cas systems. Nucleic Acids Res (2013).
[0202] Ding, Q., Regan, S. N., Xia, Y., Oostrom, L. A., Cowan, C. A., and Musunuru, K. Enhanced efficiency of human pluripotent stem cell genome editing through replacing TALENs with CRISPRs. Cell Stem Cell 12, 393-394. (2013).
[0203] Fisher, S., Barry, A., Abreu, J., Minie, B., Nolan, J., Delorey, T. M., Young, G., Fennell, T. J., Allen, A., Ambrogio, L., et al. A scalable, fully automated process for construction of sequence-ready human exome targeted capture libraries. Genome Biol 12, R1. (2011).
[0204] Friedland, A. E., Tzur, Y. B., Esvelt, K. M., Colaiacovo, M. P., Church, G. M., and Calarco, J. A. Heritable genome editing in C. elegans via a CRISPR-Cas9 system. Nat Methods 10, 741-743. (2013).
[0205] Fu, Y., Foden, J. A., Khayter, C., Maeder, M. L., Reyon, D., Joung, J. K., and Sander, J. D. High-frequency off-target mutagenesis induced by CRISPR-Cas nucleases in human cells. Nat Biotechnol 31, 822-826. (2013).
[0206] Gabriel, R. et al. An unbiased genome-wide analysis of zinc-finger nuclease specificity. Nat Biotechnol 29, 816-823 (2011).
[0207] Gilbert, L. A., Larson, M. H., Morsut, L., Liu, Z., Brar, G. A., Torres, S. E., Stern-Ginossar, N., Brandman, O., Whitehead, E. H., Doudna, J. A., et al. (2013). CRISPR-Mediated Modular RNA-Guided Regulation of Transcription in Eukaryotes. Cell 154, 442-451.
[0208] Gratz, S. J. et al. Genome engineering of Drosophila with the CRISPR RNA-guided Cas9 nuclease. Genetics (2013).
[0209] Hockemeyer, D. et al. Genetic engineering of human pluripotent cells using TALE nucleases. Nat Biotechnol 29, 731-734 (2011).
[0210] Horvath, P. & Barrangou, R. CRISPR/Cas, the immune system of bacteria and archaea. Science 327, 167-170 (2010).
[0211] Hsu, P. D., Scott, D. A., Weinstein, J. A., Ran, F. A., Konermann, S., Agarwala, V., Li, Y., Fine, E. J., Wu, X., Shalem, O., et al. DNA targeting specificity of RNA-guided Cas9 nucleases. Nat Biotechnol 31, 827-832. (2013).
[0212] Hwang, W. Y. et al. Efficient genome editing in zebrafish using a CRISPR-Cas system. Nat Biotechnol 31, 227-229 (2013).
[0213] Hwang, W. Y., Fu, Y., Reyon, D., Maeder, M. L., Kaini, P., Sander, J. D., Joung, J. K., Peterson, R. T., and Yeh, J. R. Heritable and Precise Zebrafish Genome Editing Using a CRISPR-Cas System. PLoS One 8, e68708. (2013a).
[0214] Jiang, W., Bikard, D., Cox, D., Zhang, F. & Marraffini, L. A. RNA-guided editing of bacterial genomes using CRISPR-Cas systems. Nat Biotechnol 31, 233-239 (2013). Jinek, M. et al. A programmable dual-RNA-guided DNA endonuclease in adaptive bacterial immunity. Science 337, 816-821 (2012).
[0215] Jinek, M. et al. RNA-programmed genome editing in human cells. Elife 2, e00471 (2013).
[0216] Li, D., Qiu, Z., Shao, Y., Chen, Y., Guan, Y., Liu, M., Li, Y., Gao, N., Wang, L., Lu, X., et al. Heritable gene targeting in the mouse and rat using a CRISPR-Cas system. Nat Biotechnol 31, 681-683. (2013a).
[0217] Li, W., Teng, F., Li, T., and Zhou, Q. Simultaneous generation and germline transmission of multiple gene mutations in rat using CRISPR-Cas systems. Nat Biotechnol 31, 684-686. (2013b).
[0218] Maeder, M. L., Linder, S. J., Cascio, V. M., Fu, Y., Ho, Q. H., and Joung, J. K. CRISPR RNA-guided activation of endogenous human genes. Nat Methods 10, 977-979. (2013).
[0219] Mali, P., Aach, J., Stranges, P. B., Esvelt, K. M., Moosburner, M., Kosuri, S., Yang, L., and Church, G. M. CAS9 transcriptional activators for target specificity screening and paired nickases for cooperative genome engineering. Nat Biotechnol 31, 833-838. (2013a).
[0220] Mali, P., Esvelt, K. M., and Church, G. M. Cas9 as a versatile tool for engineering biology. Nat Methods 10, 957-963. (2013b).
[0221] Mali, P. et al. RNA-guided human genome engineering via Cas9. Science 339, 823-826 (2013c).
[0222] Pattanayak, V., Lin, S., Guilinger, J. P., Ma, E., Doudna, J. A., and Liu, D. R. High-throughput profiling of off-target DNA cleavage reveals RNA-programmed Cas9 nuclease specificity. Nat Biotechnol 31, 839-843. (2013).
[0223] Pattanayak, V., Ramirez, C. L., Joung, J. K. & Liu, D. R. Revealing off-target cleavage specificities of zinc-finger nucleases by in vitro selection. Nat Methods 8, 765-770 (2011).
[0224] Perez, E. E. et al. Establishment of HIV-1 resistance in CD4+ T cells by genome editing using zinc-finger nucleases. Nat Biotechnol 26, 808-816 (2008).
[0225] Perez-Pinera, P., Kocak, D. D., Vockley, C. M., Adler, A. F., Kabadi, A. M., Polstein, L. R., Thakore, P. I., Glass, K. A., Ousterout, D. G., Leong, K. W., et al. RNA-guided gene activation by CRISPR-Cas9-based transcription factors. Nat Methods 10, 973-976. (2013).
[0226] Qi, L. S., Larson, M. H., Gilbert, L. A., Doudna, J. A., Weissman, J. S., Arkin, A. P., and Lim, W. A. Repurposing CRISPR as an RNA-guided platform for sequence-specific control of gene expression. Cell 152, 1173-1183. (2013).
[0227] Ran, F. A., Hsu, P. D., Lin, C. Y., Gootenberg, J. S., Konermann, S., Trevino, A. E., Scott, D. A., Inoue, A., Matoba, S., Zhang, Y., et al. Double nicking by RNA-guided CRISPR Cas9 for enhanced genome editing specificity. Cell 154, 1380-1389. (2013). Reyon, D. et al. FLASH assembly of TALENs for high-throughput genome editing. Nat Biotech 30, 460-465 (2012).
[0228] Sander, J. D., Maeder, M. L., Reyon, D., Voytas, D. F., Joung, J. K., and Dobbs, D. ZiFiT (Zinc Finger Targeter): an updated zinc finger engineering tool. Nucleic Acids Res 38, W462-468. (2010).
[0229] Sander, J. D., Ramirez, C. L., Linder, S. J., Pattanayak, V., Shoresh, N., Ku, M., Foden, J. A., Reyon, D., Bernstein, B. E., Liu, D. R., et al. In silico abstraction of zinc finger nuclease cleavage profiles reveals an expanded landscape of off-target sites. Nucleic Acids Res. (2013).
[0230] Sander, J. D., Zaback, P., Joung, J. K., Voytas, D. F., and Dobbs, D. Zinc Finger Targeter (ZiFiT): an engineered zinc finger/target site design tool. Nucleic Acids Res W599-605. (2007).
[0231] Shen, B. et al. Generation of gene-modified mice via Cas9/RNA-mediated gene targeting. Cell Res (2013).
[0232] Sugimoto, N. et al. Thermodynamic parameters to predict stability of RNA/DNA hybrid duplexes. Biochemistry 34, 11211-11216 (1995).
[0233] Terns, M. P. & Terns, R. M. CRISPR-based adaptive immune systems. Curr Opin Microbiol 14, 321-327 (2011).
[0234] Wang, H. et al. One-Step Generation of Mice Carrying Mutations in Multiple Genes by CRISPR/Cas-Mediated Genome Engineering. Cell 153, 910-918 (2013).
[0235] Wiedenheft, B., Sternberg, S. H. & Doudna, J. A. RNA-guided genetic silencing systems in bacteria and archaea. Nature 482, 331-338 (2012).
[0236] Yang, L., Guell, M., Byrne, S., Yang, J. L., De Los Angeles, A., Mali, P., Aach, J., Kim-Kiselak, C., Briggs, A. W., Rios, X., et al. (2013). Optimization of scarless human stem cell genome editing. Nucleic Acids Res 41, 9049-9061.

### OTHER EMBODIMENTS

[0237] It is to be understood that while the invention has been described in conjunction with the detailed description thereof, the foregoing description is intended to illustrate and not limit the scope of the invention, which is defined by the scope of the appended claims. Other aspects, advantages, and modifications are within the scope of the following claims.

The application's sequence listing, which the Patent Office published only in electronic form, follows.

SEQUENCE LISTING (3037 sequences)

SEQ ID NO: 1 - RNA, 261 nt, synthetic construct
  misc_feature 1..261: note = Description of Artificial Sequence: Synthetic guide RNA sequence
  misc_difference 1..19: note = a, c, u, g, unknown or other
  misc_difference 1..19: note = This region may encompass 17-18 or 17-19 nucleotides
  misc_difference 62..261: note = a, c, u, g, unknown or other
  misc_difference 62..261: note = This region may encompass 0-200 nucleotides
  source 1..261: mol_type = other RNA
nnnnnnnnnnnnnnnnnnngttttagagctagaaatagcaagttaaaataaggctagtccgnnnnnnnnnnnnnnnnnnnnnnnnnnnnnnnnnnnnnnnnnnnnnnnnnnnnnnnnnnnnnnnnnnnnnnnnnnnnnnnnnnnnnnnnnnnnnnnnnnnnnnnnnnnnnnnnnnnnnnnnnnnnnnnnnnnnnnnnnnnnnnnnnnnnnnnnnnnnnnnnnnnnnnnnnnnnnnnnnnnnnnnnnnnnnnnnnnnnnnnn

SEQ ID NO: 2 - RNA, 274 nt, synthetic construct
  misc_feature 1..274: note = Description of Artificial Sequence: Synthetic guide RNA sequence
  misc_difference 1..19: note = a, c, u, g, unknown or other
  misc_difference 1..19: note = This region may encompass 17-18 or 17-19 nucleotides
  misc_difference 75..274: note = a, c, u, g, unknown or other
  misc_difference 75..274: note = This region may encompass 0-200 nucleotides
  source 1..274: mol_type = other RNA
nnnnnnnnnnnnnnnnnnngttttagagctatgctgaaaagcatagcaagttaaaataaggctagtccgttatcnnnnnnnnnnnnnnnnnnnnnnnnnnnnnnnnnnnnnnnnnnnnnnnnnnnnnnnnnnnnnnnnnnnnnnnnnnnnnnnnnnnnnnnnnnnnnnnnnnnnnnnnnnnnnnnnnnnnnnnnnnnnnnnnnnnnnnnnnnnnnnnnnnnnnnnnnnnnnnnnnnnnnnnnnnnnnnnnnnnnnnnnnnnnnnnnnnnnnnnn

SEQ ID NO: 3 - RNA, 286 nt, synthetic construct
  misc_feature 1..286: note = Description of Artificial Sequence: Synthetic guide RNA sequence
  misc_difference 1..19: note = a, c, u, g, unknown or other
  misc_difference 1..19: note = This region may encompass 17-18 or 17-19 nucleotides
  misc_difference 87..286: note = a, c, u, g, unknown or other
  misc_difference 87..286: note = This region may encompass 0-200 nucleotides
  source 1..286: mol_type = other RNA
nnnnnnnnnnnnnnnnnnngttttagagctatgctgttttggaaacaaaacagcatagcaagttaaaataaggctagtccgttatcnnnnnnnnnnnnnnnnnnnnnnnnnnnnnnnnnnnnnnnnnnnnnnnnnnnnnnnnnnnnnnnnnnnnnnnnnnnnnnnnnnnnnnnnnnnnnnnnnnnnnnnnnnnnnnnnnnnnnnnnnnnnnnnnnnnnnnnnnnnnnnnnnnnnnnnnnnnnnnnnnnnnnnnnnnnnnnnnnnnnnnnnnnnnnnnnnnnnnnnn

SEQ ID NO: 4 - RNA, 294 nt, synthetic construct
  misc_feature 1..294: note = Description of Artificial Sequence: Synthetic guide RNA sequence
  misc_difference 1..18: note = a, c, u, g, unknown or other
  misc_difference 1..18: note = This region may encompass 17-18 nucleotides
  misc_difference 95..294: note = a, c, u, g, unknown or other
  misc_difference 95..294: note = This region may encompass 0-200 nucleotides
  source 1..294: mol_type = other RNA
nnnnnnnnnnnnnnnnnngttttagagctagaaatagcaagttaaaataaggctagtccgttatcaacttgaaaaagtggcaccgagtcggtgcnnnnnnnnnnnnnnnnnnnnnnnnnnnnnnnnnnnnnnnnnnnnnnnnnnnnnnnnnnnnnnnnnnnnnnnnnnnnnnnnnnnnnnnnnnnnnnnnnnnnnnnnnnnnnnnnnnnnnnnnnnnnnnnnnnnnnnnnnnnnnnnnnnnnnnnnnnnnnnnnnnnnnnnnnnnnnnnnnnnnnnnnnnnnnnnnnnnnnnnn

SEQ ID NO: 5 - RNA, 95 nt, synthetic construct
  misc_feature 1..95: note = Description of Artificial Sequence: Synthetic guide RNA sequence
  misc_difference 1..19: note = a, c, u, g, unknown or other
  misc_difference 1..19: note = This region may encompass 17-18 or 17-19 nucleotides
  source 1..95: mol_type = other RNA
nnnnnnnnnnnnnnnnnnngtttaagagctagaaatagcaagtttaaataaggctagtccgttatcaacttgaaaaagtggcaccgagtcggtgc

SEQ ID NO: 6 - RNA, 105 nt, synthetic construct
  misc_feature 1..105: note = Description of Artificial Sequence: Synthetic guide RNA sequence
  misc_difference 1..19: note = a, c, u, g, unknown or other
  misc_difference 1..19: note = This region may encompass 17-18 or 17-19 nucleotides
  source 1..105: mol_type = other RNA
nnnnnnnnnnnnnnnnnnngttttagagctatgctggaaacagcatagcaagtttaaataaggctagtccgttatcaacttgaaaaagtggcaccgagtcggtgc

SEQ ID NO: 7 - RNA, 105 nt, synthetic construct
  misc_feature 1..105: note = Description of Artificial Sequence: Synthetic guide RNA sequence
  misc_difference 1..19: note = a, c, u, g, unknown or other
  misc_difference 1..19: note = This region may encompass 17-18 or 17-19 nucleotides
  source 1..105: mol_type = other RNA
nnnnnnnnnnnnnnnnnnngtttaagagctatgctggaaacagcatagcaagtttaaataaggctagtccgttatcaacttgaaaaagtggcaccgagtcggtgc

SEQ ID NO: 8 - RNA, 79 nt, synthetic construct
  misc_feature 1..79: note = Description of Artificial Sequence: Synthetic tracrRNA sequence
  source 1..79: mol_type = other RNA
ggaaccattcaaaacagcatagcaagttaaaataaggctagtccgttatcaacttgaaaaagtggcaccgagtcggtgc

SEQ ID NO: 9 - DNA, 23 bp, synthetic construct
  misc_feature 1..23: note = Description of Artificial Sequence: Synthetic EGFP target site sequence
  source 1..23: mol_type = other DNA
gggcacgggcagcttgccggtgg

SEQ ID NO: 10 - DNA, 23 bp, synthetic construct
  misc_feature 1..23: note = Description of Artificial Sequence: Synthetic EGFP target site sequence
  source 1..23: mol_type = other DNA
gatgccgttcttctgcttgtcgg

SEQ ID NO: 11 - DNA, 23 bp, synthetic construct
  misc_feature 1..23: note = Description of Artificial Sequence: Synthetic EGFP target site sequence
  source 1..23: mol_type = other DNA
ggtggtgcagatgaacttcaggg

SEQ ID NO: 12 - DNA, 23 bp, synthetic construct
  misc_feature 1..23: note = Description of Artificial Sequence: Synthetic VEGFA on-target sequence
  source 1..23: mol_type = other DNA
gaccccctccaccccgcctccgg

SEQ ID NO: 13 - DNA, 23 bp, synthetic construct
  misc_feature 1..23: note = Description of Artificial Sequence: Synthetic VEGFA off-target sequence
  source 1..23: mol_type = other DNA
gaccccccccaccccgcccccgg

SEQ ID NO: 14 - DNA, 23 bp, synthetic construct
  misc_feature 1..23: note = Description of Artificial Sequence: Synthetic VEGFA off-target sequence
  source 1..23: mol_type = other DNA
gggcccctccaccccgcctctgg

SEQ ID NO: 15 - DNA, 23 bp, synthetic construct
  misc_feature 1..23: note = Description of Artificial Sequence: Synthetic VEGFA off-target sequence
  source 1..23: mol_type = other DNA
ctacccctccaccccgcctccgg

SEQ ID NO: 16 - DNA, 23 bp, synthetic construct
  misc_feature 1..23: note = Description of Artificial Sequence: Synthetic VEGFA off-target sequence
  source 1..23: mol_type = other DNA
gcccccacccaccccgcctctgg

SEQ ID NO: 17 - DNA, 23 bp, synthetic construct
  misc_feature 1..23: note = Description of Artificial Sequence: Synthetic VEGFA off-target sequence
  source 1..23: mol_type = other DNA
taccccccacaccccgcctctgg

SEQ ID NO: 18 - DNA, 23 bp, synthetic construct
  misc_feature 1..23: note = Description of Artificial Sequence: Synthetic VEGFA off-target sequence
  source 1..23: mol_type = other DNA
acacccccccaccccgcctcagg

SEQ ID NO: 19 - DNA, 23 bp, synthetic construct
  misc_feature 1..23: note = Description of Artificial Sequence: Synthetic VEGFA off-target sequence
  source 1..23: mol_type = other DNA
attcccccccaccccgcctcagg

SEQ ID NO: 20 - DNA, 23 bp, synthetic construct
  misc_feature 1..23: note = Description of Artificial Sequence: Synthetic VEGFA off-target sequence
  source 1..23: mol_type = other DNA
ccccacccccaccccgcctcagg

SEQ ID NO: 21 - DNA, 23 bp, synthetic construct
  misc_feature 1..23: note = Description of Artificial Sequence: Synthetic VEGFA off-target sequence
  source 1..23: mol_type = other DNA
cgccctccccaccccgcctccgg

SEQ ID NO: 22 - DNA, 23 bp, synthetic construct
  misc_feature 1..23: note = Description of Artificial Sequence: Synthetic VEGFA off-target sequence
  source 1..23: mol_type = other DNA
ctccccacccaccccgcctcagg

SEQ ID NO: 23 - DNA, 23 bp, synthetic construct
  misc_feature 1..23: note = Description of Artificial Sequence: Synthetic VEGFA off-target sequence
  source 1..23: mol_type = other DNA
tgcccctcccaccccgcctctgg

SEQ ID NO: 24 - DNA, 23 bp, synthetic construct
  misc_feature 1..23: note = Description of Artificial Sequence: Synthetic VEGFA off-target sequence
  source 1..23: mol_type = other DNA
aggcccccacaccccgcctcagg

SEQ ID NO: 25 - DNA, 23 bp, synthetic construct
  misc_feature 1..23: note = Description of Artificial Sequence: Synthetic VEGFA on-target sequence
  source 1..23: mol_type = other DNA
ggtgagtgagtgtgtgcgtgtgg

SEQ ID NO: 26 - DNA, 23 bp, synthetic construct
  misc_feature 1..23: note = Description of Artificial Sequence: Synthetic VEGFA off-target sequence
  source 1..23: mol_type = other DNA
ggtgagtgagtgtgtgtgtgagg

SEQ ID NO: 27 - DNA, 23 bp, synthetic construct
  misc_feature 1..23: note = Description of Artificial Sequence: Synthetic VEGFA off-target sequence
  source 1..23: mol_type = other DNA
agtgagtgagtgtgtgtgtgggg

SEQ ID NO: 28 - DNA, 23 bp, synthetic construct
  misc_feature 1..23: note = Description of Artificial Sequence: Synthetic VEGFA off-target sequence
  source 1..23: mol_type = other DNA
gctgagtgagtgtatgcgtgtgg

SEQ ID NO: 29 - DNA, 23 bp, synthetic construct
  misc_feature 1..23: note = Description of Artificial Sequence: Synthetic VEGFA off-target sequence
  source 1..23: mol_type = other DNA
ggtgagtgagtgcgtgcgggtgg

SEQ ID NO: 30 - DNA, 23 bp, synthetic construct
  misc_feature 1..23: note = Description of Artificial Sequence: Synthetic VEGFA off-target sequence
  source 1..23: mol_type = other DNA
gttgagtgaatgtgtgcgtgagg

SEQ ID NO: 31 - DNA, 23 bp, synthetic construct
  misc_feature 1..23: note = Description of Artificial Sequence: Synthetic VEGFA off-target sequence
  source 1..23: mol_type = other DNA
tgtgggtgagtgtgtgcgtgagg

SEQ ID NO: 32 - DNA, 23 bp, synthetic construct
  misc_feature 1..23: note = Description of Artificial Sequence: Synthetic VEGFA off-target sequence
  source 1..23: mol_type = other DNA
agagagtgagtgtgtgcatgagg

SEQ ID NO: 33 - protein, 1368 aa, synthetic construct
  REGION 1..1368: note = Description of Artificial Sequence: Synthetic catalytically inactive Cas9 polypeptide
MDKKYSIGLAIGTNSVGWAVITDEYKVPSKKFKVLGNTDRHSIKKNLIGALLFDSGETAEATRLKRTARRRYTRRKNRICYLQEIFSNEMAKVDDSFFHRLEESFLVEEDKKHERHPIFGNIVDEVAYHEKYPTIYHLRKKLVDSTDKADLRLIYLALAHMIKFRGHFLIEGDLNPDNSDVDKLFIQLVQTYNQLFEENPINASGVDAKAILSARLSKSRRLENLIAQLPGEKKNGLFGNLIALSLGLTPNFKSNFDLAEDAKLQLSKDTYDDDLDNLLAQIGDQYADLFLAAKNLSDAILLSDILRVNTEITKAPLSASMIKRYDEHHQDLTLLKALVRQQLPEKYKEIFFDQSKNGYAGYIDGGASQEEFYKFIKPILEKMDGTEELLVKLNREDLLRKQRTFDNGSIPHQIHLGELHAILRRQEDFYPFLKDNREKIEKILTFRIPYYVGPLARGNSRFAWMTRKSEETITPWNFEEVVDKGASAQSFIERMTNFDKNLPNEKVLPKHSLLYEYFTVYNELTKVKYVTEGMRKPAFLSGEQKKAIVDLLFKTNRKVTVKQLKEDYFKKIECFDSVEISGVEDRFNASLGTYHDLLKIIKDKDFLDNEENEDILEDIVLTLTLFEDREMIEERLKTYAHLFDDKVMKQLKRRRYTGWGRLSRKLINGIRDKQSGKTILDFLKSDGFANRNFMQLIHDDSLTFKEDIQKAQVSGQGDSLHEHIANLAGSPAIKKGILQTVKVVDELVKVMGRHKPENIVIEMARENQTTQKGQKNSRERMKRIEEGIKELGSQILKEHPVENTQLQNEKLYLYYLQNGRDMYVDQELDINRLSDYDVDAIVPQSFLKDDSIDNKVLTRSDKNRGKSDNVPSEEVVKKMKNYWRQLLNAKLITQRKFDNLTKAERGGLSELDKAGFIKRQLVETRQITKHVAQILDSRMNTKYDENDKLIREVKVITLKSKLVSDFRKDFQFYKVREINNYHHAHDAYLNAVVGTALIKKYPKLESEFVYGDYKVYDVRKMIAKSEQEIGKATAKYFFYSNIMNFFKTEITLANGEIRKRPLIETNGETGEIVWDKGRDFATVRKVLSMPQVNIVKKTEVQTGGFSKESILPKRNSDKLIARKKDWDPKKYGGFDSPTVAYSVLVVAKVEKGKSKKLKSVKELLGITIMERSSFEKNPIDFLEAKGYKEVKKDLIIKLPKYSLFELENGRKRMLASAGELQKGNELALPSKYVNFLYLASHYEKLKGSPEDNEQKQLFVEQHKHYLDEIIEQISEFSKRVILADANLDKVLSAYNKHRDKPIREQAENIIHLFTLTNLGAPAAFKYFDTTIDRKRYTSTKEVLDATLIHQSITGLYETRIDLSQLGGD

SEQ ID NO: 34 - protein, 4 aa, synthetic construct
  REGION 1..4: note = Description of Artificial Sequence: Synthetic linker sequence
GGGS

SEQ ID NO: 35 - protein, 5 aa, synthetic construct
  REGION 1..5: note = Description of Artificial Sequence: Synthetic linker sequence
GGGGS

SEQ ID NO: 36 - DNA, 26 bp, synthetic construct
  misc_feature 1..26: note = Description of Artificial Sequence: Synthetic oligonucleotide for constructing gRNA expression plasmid
  source 1..26: mol_type = other DNA
acaccgggcacgggcagcttgccggg

SEQ ID NO: 37 - DNA, 26 bp, synthetic construct
  misc_feature 1..26: note = Description of Artificial Sequence: Synthetic oligonucleotide for constructing gRNA expression plasmid
  source 1..26: mol_type = other DNA
acaccgggcacgggcagcttgccgcg

SEQ ID NO: 38 - DNA, 26 bp, synthetic construct
  misc_feature 1..26: note = Description of Artificial Sequence: Synthetic oligonucleotide for constructing gRNA expression plasmid
  source 1..26: mol_type = other DNA
acaccgggcacgggcagcttgcccgg

SEQ ID NO: 39 - DNA, 26 bp, synthetic construct
  misc_feature 1..26: note = Description of Artificial Sequence: Synthetic oligonucleotide for constructing gRNA expression plasmid
  source 1..26: mol_type = other DNA
acaccgggcacgggcagcttgcgggg

SEQ ID NO: 40 - DNA, 26 bp, synthetic construct
  misc_feature 1..26: note = Description of Artificial Sequence: Synthetic oligonucleotide for constructing gRNA expression plasmid
  source 1..26: mol_type = other DNA
acaccgggcacgggcagcttggcggg

SEQ ID NO: 41 - DNA, 26 bp, synthetic construct
  misc_feature 1..26: note = Description of Artificial Sequence: Synthetic oligonucleotide for constructing gRNA expression plasmid
  source 1..26: mol_type = other DNA
acaccgggcacgggcagcttcccggg

SEQ ID NO: 42 - DNA, 26 bp, synthetic construct
  misc_feature 1..26: note = Description of Artificial Sequence: Synthetic oligonucleotide for constructing gRNA expression plasmid
  source 1..26: mol_type = other DNA
acaccgggcacgggcagctagccggg

SEQ ID NO: 43 - DNA, 26 bp, synthetic construct
  misc_feature 1..26: note = Description of Artificial Sequence: Synthetic oligonucleotide for constructing gRNA expression plasmid
  source 1..26: mol_type = other DNA
acaccgggcacgggcagcatgccggg

SEQ ID NO: 44 - DNA, 26 bp, synthetic construct
  misc_feature 1..26: note = Description of Artificial Sequence: Synthetic oligonucleotide for constructing gRNA expression plasmid
  source 1..26: mol_type = other DNA
acaccgggcacgggcaggttgccggg

SEQ ID NO: 45 - DNA, 26 bp, synthetic construct
  misc_feature 1..26: note = Description of Artificial Sequence: Synthetic oligonucleotide for constructing gRNA expression plasmid
  source 1..26: mol_type = other DNA
acaccgggcacgggcaccttgccggg

SEQ ID NO: 46 - DNA, 26 bp, synthetic construct
  misc_feature 1..26: note = Description of Artificial Sequence: Synthetic oligonucleotide for constructing gRNA expression plasmid
  source 1..26: mol_type = other DNA
acaccgggcacgggctgcttgccggg

SEQ ID NO: 47 - DNA, 26 bp, synthetic construct
  misc_feature 1..26: note = Description of Artificial Sequence: Synthetic oligonucleotide for constructing gRNA expression plasmid
  source 1..26: mol_type = other DNA
acaccgggcacggggagcttgccggg

SEQ ID NO: 48 - DNA, 26 bp, synthetic construct
  misc_feature 1..26: note = Description of Artificial Sequence: Synthetic oligonucleotide for constructing gRNA expression plasmid
  source 1..26: mol_type = other DNA
acaccgggcacggccagcttgccggg

SEQ ID NO: 49 - DNA, 26 bp, synthetic construct
  misc_feature 1..26: note = Description of Artificial Sequence: Synthetic oligonucleotide for constructing gRNA expression plasmid
  source 1..26: mol_type = other DNA
acaccgggcacgcgcagcttgccggg

SEQ ID NO: 50 - DNA, 26 bp, synthetic construct
  misc_feature 1..26: note = Description of Artificial Sequence: Synthetic oligonucleotide for constructing gRNA expression plasmid
  source 1..26: mol_type = other DNA
acaccgggcaccggcagcttgccggg

SEQ ID NO: 51 - DNA, 26 bp, synthetic construct
  misc_feature 1..26: note = Description of Artificial Sequence: Synthetic oligonucleotide for constructing gRNA expression plasmid
  source 1..26: mol_type = other DNA
acaccgggcaggggcagcttgccggg

SEQ ID NO: 52 - DNA, 26 bp, synthetic construct
  misc_feature 1..26: note = Description of Artificial Sequence: Synthetic oligonucleotide for constructing gRNA expression plasmid
  source 1..26: mol_type = other DNA
acaccgggctcgggcagcttgccggg

SEQ ID NO: 53 - DNA, 26 bp, synthetic construct
  misc_feature 1..26: note = Description of Artificial Sequence: Synthetic oligonucleotide for constructing gRNA expression plasmid
  source 1..26: mol_type = other DNA
acaccggggacgggcagcttgccggg

SEQ ID NO: 54 - DNA, 26 bp, synthetic construct
  misc_feature 1..26: note = Description of Artificial Sequence: Synthetic oligonucleotide for constructing gRNA expression plasmid
  source 1..26: mol_type = other DNA
acaccggccacgggcagcttgccggg

SEQ ID NO: 55 - DNA, 26 bp, synthetic construct
  misc_feature 1..26: note = Description of Artificial Sequence: Synthetic oligonucleotide for constructing gRNA expression plasmid
  source 1..26: mol_type = other DNA
acaccgcgcacgggcagcttgccggg

SEQ ID NO: 56 - DNA, 26 bp, synthetic construct
  misc_feature 1..26: note = Description of Artificial Sequence: Synthetic oligonucleotide for constructing gRNA expression plasmid
  source 1..26: mol_type = other DNA
acaccgggcacgggcagcttgccccg

SEQ ID NO: 57 - DNA, 26 bp, synthetic construct
  misc_feature 1..26: note = Description of Artificial Sequence: Synthetic oligonucleotide for constructing gRNA expression plasmid
  source 1..26: mol_type = other DNA
acaccgggcacgggcagcttgggggg

SEQ ID NO: 58 - DNA, 26 bp, synthetic construct
  misc_feature 1..26: note = Description of Artificial Sequence: Synthetic oligonucleotide for constructing gRNA expression plasmid
  source 1..26: mol_type = other DNA
acaccgggcacgggcagctacccggg

SEQ ID NO: 59 - DNA, 26 bp, synthetic construct
  misc_feature 1..26: note = Description of Artificial Sequence: Synthetic oligonucleotide for constructing gRNA expression plasmid
  source 1..26: mol_type = other DNA
acaccgggcacgggcaggatgccggg

SEQ ID NO: 60 - DNA, 26 bp, synthetic construct
  misc_feature 1..26: note = Description of Artificial Sequence: Synthetic oligonucleotide for constructing gRNA expression plasmid
  source 1..26: mol_type = other DNA
acaccgggcacgggctccttgccggg

SEQ ID NO: 61 - DNA, 26 bp, synthetic construct
  misc_feature 1..26: note = Description of Artificial Sequence: Synthetic oligonucleotide for constructing gRNA expression plasmid
  source 1..26: mol_type = other DNA
acaccgggcacggcgagcttgccggg

SEQ ID NO: 62 - DNA, 26 bp, synthetic construct
  misc_feature 1..26: note = Description of Artificial Sequence: Synthetic oligonucleotide for constructing gRNA expression plasmid
  source 1..26: mol_type = other DNA
acaccgggcacccgcagcttgccggg

SEQ ID NO: 63 - DNA, 26 bp, synthetic construct
  misc_feature 1..26: note = Description of Artificial Sequence: Synthetic oligonucleotide for constructing gRNA expression plasmid
  source 1..26: mol_type = other DNA
acaccgggctggggcagcttgccggg

SEQ ID NO: 64 - DNA, 26 bp, synthetic construct
  misc_feature 1..26: note = Description of Artificial Sequence: Synthetic oligonucleotide for constructing gRNA expression plasmid
  source 1..26: mol_type = other DNA
acaccggcgacgggcagcttgccggg

SEQ ID NO: 65 - DNA, 26 bp, synthetic construct
  misc_feature 1..26: note = Description of Artificial Sequence: Synthetic oligonucleotide for constructing gRNA expression plasmid
  source 1..26: mol_type = other DNA
acaccgcccacgggcagcttgccggg

SEQ ID NO: 66 - DNA, 26 bp, synthetic construct
  misc_feature 1..26: note = Description of Artificial Sequence: Synthetic oligonucleotide for constructing gRNA expression plasmid
  source 1..26: mol_type = other DNA
acaccgccgacgggcagcttgccggg

SEQ ID NO: 67 - DNA, 26 bp, synthetic construct
  misc_feature 1..26: note = Description of Artificial Sequence: Synthetic oligonucleotide for constructing gRNA expression plasmid
  source 1..26: mol_type = other DNA
acaccgccgtcgggcagcttgccggg

SEQ ID NO: 68 - DNA, 26 bp, synthetic construct
  misc_feature 1..26: note = Description of Artificial Sequence: Synthetic oligonucleotide for constructing gRNA expression plasmid
  source 1..26: mol_type = other DNA
acaccgccgtggggcagcttgccggg

SEQ ID NO: 69 - DNA, 26 bp, synthetic construct
  misc_feature 1..26: note = Description of Artificial Sequence: Synthetic oligonucleotide for constructing gRNA expression plasmid
  source 1..26: mol_type = other DNA
acaccgccgtgcggcagcttgccggg

SEQ ID NO: 70 - DNA, 26 bp, synthetic construct
  misc_feature 1..26: note = Description of Artificial Sequence: Synthetic oligonucleotide for constructing gRNA expression plasmid
  source 1..26: mol_type = other DNA
acaccgccgtgccgcagcttgccggg

SEQ ID NO: 71 - DNA, 26 bp, synthetic construct
  misc_feature 1..26: note = Description of Artificial Sequence: Synthetic oligonucleotide for constructing gRNA expression plasmid
  source 1..26: mol_type = other DNA
acaccgccgtgccccagcttgccggg

SEQ ID NO: 72 - DNA, 26 bp, synthetic construct
  misc_feature 1..26: note = Description of Artificial Sequence: Synthetic oligonucleotide for constructing gRNA expression plasmid
  source 1..26: mol_type = other DNA
acaccgccgtgcccgagcttgccggg

SEQ ID NO: 73 - DNA, 26 bp, synthetic construct
  misc_feature 1..26: note = Description of Artificial Sequence: Synthetic oligonucleotide for constructing gRNA expression plasmid
  source 1..26: mol_type = other DNA
acaccgggcacgggcagcttgcggcg

SEQ ID NO: 74 - DNA, 26 bp, synthetic construct
  misc_feature 1..26: note = Description of Artificial Sequence: Synthetic oligonucleotide for constructing gRNA expression plasmid
  source 1..26: mol_type = other DNA
acaccgggcacgggcagcttccgggg

SEQ ID NO: 75 - DNA, 26 bp, synthetic construct
  misc_feature 1..26: note = Description of Artificial Sequence: Synthetic oligonucleotide for constructing gRNA expression plasmid
  source 1..26: mol_type = other DNA
acaccgggcacgggcagcatgcgggg

SEQ ID NO: 76 - DNA, 26 bp, synthetic construct
  misc_feature 1..26: note = Description of Artificial Sequence: Synthetic oligonucleotide for constructing gRNA expression plasmid
  source 1..26: mol_type = other DNA
acaccgggcacgggcaccttgcgggg

SEQ ID NO: 77 - DNA, 26 bp, synthetic construct
  misc_feature 1..26: note = Description of Artificial Sequence: Synthetic oligonucleotide for constructing gRNA expression plasmid
  source 1..26: mol_type = other DNA
acaccgggcacggggagcttgcgggg

SEQ ID NO: 78 - DNA, 26 bp, synthetic construct
  misc_feature 1..26: note = Description of Artificial Sequence: Synthetic oligonucleotide for constructing gRNA expression plasmid
  source 1..26: mol_type = other DNA
acaccgggcacgcgcagcttgcgggg

SEQ ID NO: 79 - DNA, 26 bp, synthetic construct
  misc_feature 1..26: note = Description of Artificial Sequence: Synthetic oligonucleotide for constructing gRNA expression plasmid
  source 1..26: mol_type = other DNA
acaccgggcaggggcagcttgcgggg

SEQ ID NO: 80 - DNA, 26 bp, synthetic construct
  misc_feature 1..26: note = Description of Artificial Sequence: Synthetic oligonucleotide for constructing gRNA expression plasmid
  source 1..26: mol_type = other DNA
acaccggggacgggcagcttgcgggg

SEQ ID NO: 81 - DNA, 26 bp, synthetic construct
  misc_feature 1..26: note = Description of Artificial Sequence: Synthetic oligonucleotide for constructing gRNA expression plasmid
  source 1..26: mol_type = other DNA
acaccgcgcacgggcagcttgcgggg

SEQ ID NO: 82 - DNA, 26 bp, synthetic construct
  misc_feature 1..26: note = Description of Artificial Sequence: Synthetic oligonucleotide for constructing gRNA expression plasmid
  source 1..26: mol_type = other DNA
acaccgggcacggggagcttgccgcg

SEQ ID NO: 83 - DNA, 26 bp, synthetic construct
  misc_feature 1..26: note = Description of Artificial Sequence: Synthetic oligonucleotide for constructing gRNA expression plasmid
  source 1..26: mol_type = other DNA
acaccgggcacggggagcttcccggg

SEQ ID NO: 84 - DNA, 26 bp, synthetic construct
  misc_feature 1..26: note = Description of Artificial Sequence: Synthetic oligonucleotide for constructing gRNA expression plasmid
  source 1..26: mol_type = other DNA
acaccgggcacggggagcatgccggg

SEQ ID NO: 85 - DNA, 26 bp, synthetic construct
  misc_feature 1..26: note = Description of Artificial Sequence: Synthetic oligonucleotide for constructing gRNA expression plasmid
  source 1..26: mol_type = other DNA
acaccgggcacggggaccttgccggg

SEQ ID NO: 86 - DNA, 26 bp, synthetic construct
  misc_feature 1..26: note = Description of Artificial Sequence: Synthetic oligonucleotide for constructing gRNA expression plasmid
  source 1..26: mol_type = other DNA
acaccgggcacgcggagcttgccggg

SEQ ID NO: 87 - DNA, 26 bp, synthetic construct
  misc_feature 1..26: note = Description of Artificial Sequence: Synthetic oligonucleotide for constructing gRNA expression plasmid
  source 1..26: mol_type = other DNA
acaccgggcagggggagcttgccggg

SEQ ID NO: 88 - DNA, 26 bp, synthetic construct
  misc_feature 1..26: note = Description of Artificial Sequence: Synthetic oligonucleotide for constructing gRNA expression plasmid
  source 1..26: mol_type = other DNA
acaccggggacggggagcttgccggg

SEQ ID NO: 89 - DNA, 26 bp, synthetic construct
  misc_feature 1..26: note = Description of Artificial Sequence: Synthetic oligonucleotide for constructing gRNA expression plasmid
  source 1..26: mol_type = other DNA
acaccgcgcacggggagcttgccggg

SEQ ID NO: 90 - DNA, 26 bp, synthetic construct
  misc_feature 1..26: note = Description of Artificial Sequence: Synthetic oligonucleotide for constructing gRNA expression plasmid
  source 1..26: mol_type = other DNA
acaccgcgcacgggcagcttgccgcg

SEQ ID NO: 91 - DNA, 26 bp, synthetic construct
  misc_feature 1..26: note = Description of Artificial Sequence: Synthetic oligonucleotide for constructing gRNA expression plasmid
  source 1..26: mol_type = other DNA
acaccgcgcacgggcagcttcccggg

SEQ ID NO: 92 - DNA, 26 bp, synthetic construct
  misc_feature 1..26: note = Description of Artificial Sequence: Synthetic oligonucleotide for constructing gRNA expression plasmid
  source 1..26: mol_type = other DNA
acaccgcgcacgggcagcatgccggg

SEQ ID NO: 93 - DNA, 26 bp, synthetic construct
  misc_feature 1..26: note = Description of Artificial Sequence: Synthetic oligonucleotide for constructing gRNA expression plasmid
  source 1..26: mol_type = other DNA
acaccgcgcacgggcaccttgccggg

SEQ ID NO: 94 - DNA, 26 bp, synthetic construct
  misc_feature 1..26: note = Description of Artificial Sequence: Synthetic oligonucleotide for constructing gRNA expression plasmid
  source 1..26: mol_type = other DNA
acaccgcgcacgcgcagcttgccggg

SEQ ID NO: 95 - DNA, 26 bp, synthetic construct
  misc_feature 1..26: note = Description of Artificial Sequence: Synthetic oligonucleotide for constructing gRNA expression plasmid
  source 1..26: mol_type = other DNA
acaccgcgcaggggcagcttgccggg

SEQ ID NO: 96 - DNA, 26 bp, synthetic construct
  misc_feature 1..26: note = Description of Artificial Sequence: Synthetic oligonucleotide for constructing gRNA expression plasmid
  source 1..26: mol_type = other DNA
acaccgcggacgggcagcttgccggg

SEQ ID NO: 97 - DNA, 26 bp, synthetic construct
  misc_feature 1..26: note = Description of Artificial Sequence: Synthetic oligonucleotide for constructing gRNA expression plasmid
  source 1..26: mol_type = other DNA
acaccgatgccgttcttctgcttgtg

SEQ ID NO: 98 - DNA, 26 bp, synthetic construct
  misc_feature 1..26: note = Description of Artificial Sequence: Synthetic oligonucleotide for constructing gRNA expression plasmid
  source 1..26: mol_type = other DNA
acaccgatgccgttcttctgcttgag

SEQ ID NO: 99 - DNA, 26 bp, synthetic construct
  misc_feature 1..26: note = Description of Artificial Sequence: Synthetic oligonucleotide for constructing gRNA expression plasmid
  source 1..26: mol_type = other DNA
acaccgatgccgttcttctgcttctg

SEQ ID NO: 100 - DNA, 26 bp, synthetic construct
  misc_feature 1..26: note = Description of Artificial Sequence: Synthetic oligonucleotide for constructing gRNA expression plasmid
  source 1..26: mol_type = other DNA
acaccgatgccgttcttctgctagtg

SEQ ID NO: 101 - DNA, 26 bp, synthetic construct
  misc_feature 1..26: note = Description of Artificial Sequence: Synthetic oligonucleotide for constructing gRNA expression plasmid
  source 1..26: mol_type = other DNA
acaccgatgccgttcttctgcatgtg

SEQ ID NO: 102 - DNA, 26 bp, synthetic construct
  misc_feature 1..26: note = Description of Artificial Sequence: Synthetic oligonucleotide for constructing gRNA expression plasmid
  source 1..26: mol_type = other DNA
acaccgatgccgttcttctggttgtg

SEQ ID NO: 103 - DNA, 26 bp, synthetic construct
  misc_feature 1..26: note = Description of Artificial Sequence: Synthetic oligonucleotide for constructing gRNA expression plasmid
  source 1..26: mol_type = other DNA
acaccgatgccgttcttctccttgtg

SEQ ID NO: 104 - DNA, 26 bp, synthetic construct
  misc_feature 1..26: note = Description of Artificial Sequence: Synthetic oligonucleotide for constructing gRNA expression plasmid
  source 1..26: mol_type = other DNA
acaccgatgccgttcttcagcttgtg

SEQ ID NO: 105 - DNA, 26 bp, synthetic construct
  misc_feature 1..26: note = Description of Artificial Sequence: Synthetic oligonucleotide for constructing gRNA expression plasmid
  source 1..26: mol_type = other DNA
acaccgatgccgttcttgtgcttgtg

SEQ ID NO: 106 - DNA, 26 bp, synthetic construct
  misc_feature 1..26: note = Description of Artificial Sequence: Synthetic oligonucleotide for constructing gRNA expression plasmid
  source 1..26: mol_type = other DNA
acaccgatgccgttctactgcttgtg

SEQ ID NO: 107 - DNA, 26 bp, synthetic construct
  misc_feature 1..26: note = Description of Artificial Sequence: Synthetic oligonucleotide for constructing gRNA expression plasmid
  source 1..26: mol_type = other DNA
acaccgatgccgttcatctgcttgtg

SEQ ID NO: 108 - DNA, 26 bp, synthetic construct
  misc_feature 1..26: note = Description of Artificial Sequence: Synthetic oligonucleotide for constructing gRNA expression plasmid
  source 1..26: mol_type = other DNA
acaccgatgccgttgttctgcttgtg

SEQ ID NO: 109 - DNA, 26 bp, synthetic construct
  misc_feature 1..26: note = Description of Artificial Sequence: Synthetic oligonucleotide for constructing gRNA expression plasmid
  source 1..26: mol_type = other DNA
acaccgatgccgtacttctgcttgtg

SEQ ID NO: 110 - DNA, 26 bp, synthetic construct
  misc_feature 1..26: note = Description of Artificial Sequence: Synthetic oligonucleotide for constructing gRNA expression plasmid
  source 1..26: mol_type = other DNA
acaccgatgccgatcttctgcttgtg

SEQ ID NO: 111 - DNA, 26 bp, synthetic construct
  misc_feature 1..26: note = Description of Artificial Sequence: Synthetic oligonucleotide for constructing gRNA expression plasmid
  source 1..26: mol_type = other DNA
acaccgatgcccttcttctgcttgtg

SEQ ID NO: 112 - DNA, 26 bp, synthetic construct
  misc_feature 1..26: note = Description of Artificial Sequence: Synthetic oligonucleotide for constructing gRNA expression plasmid
  source 1..26: mol_type = other DNA
acaccgatgcggttcttctgcttgtg

SEQ ID NO: 113 - DNA, 26 bp, synthetic construct
  misc_feature 1..26: note = Description of Artificial Sequence: Synthetic oligonucleotide for constructing gRNA expression plasmid
  source 1..26: mol_type = other DNA
acaccgatggcgttcttctgcttgtg

SEQ ID NO: 114 - DNA, 26 bp, synthetic construct
  misc_feature 1..26: note = Description of Artificial Sequence: Synthetic oligonucleotide for constructing gRNA expression plasmid
  source 1..26: mol_type = other DNA
acaccgatcccgttcttctgcttgtg

SEQ ID NO: 115 - DNA, 26 bp, synthetic construct
  misc_feature 1..26: note = Description of Artificial Sequence: Synthetic oligonucleotide for constructing gRNA expression plasmid
  source 1..26: mol_type = other DNA
acaccgaagccgttcttctgcttgtg

SEQ ID NO: 116 - DNA, 26 bp, synthetic construct
  misc_feature 1..26: note = Description of Artificial Sequence: Synthetic oligonucleotide for constructing gRNA expression plasmid
  source 1..26: mol_type = other DNA
acaccgttgccgttcttctgcttgtg

SEQ ID NO: 117 - DNA, 26 bp, synthetic construct
  misc_feature 1..26: note = Description of Artificial Sequence: Synthetic oligonucleotide for constructing gRNA expression plasmid
  source 1..26: mol_type = other DNA
acaccgatgccgttcttctgcttcag

SEQ ID NO: 118 - DNA, 26 bp, synthetic construct
  misc_feature 1..26: note = Description of Artificial Sequence: Synthetic oligonucleotide for constructing gRNA expression plasmid
  source 1..26: mol_type = other DNA
acaccgatgccgttcttctgcaagtg

SEQ ID NO: 119 - DNA, 26 bp, synthetic construct
  misc_feature 1..26: note = Description of Artificial Sequence: Synthetic oligonucleotide for constructing gRNA expression plasmid
  source 1..26: mol_type = other DNA
acaccgatgccgttcttctcgttgtg

SEQ ID NO: 120 - DNA, 26 bp, synthetic construct
  misc_feature 1..26: note = Description of Artificial Sequence: Synthetic oligonucleotide for constructing gRNA expression plasmid
  source 1..26: mol_type = other DNA
acaccgatgccgttcttgagcttgtg

SEQ ID NO: 121 - DNA, 26 bp, synthetic construct
  misc_feature 1..26: note = Description of Artificial Sequence: Synthetic oligonucleotide for constructing gRNA expression plasmid
  source 1..26: mol_type = other DNA
acaccgatgccgttcaactgcttgtg

SEQ ID NO: 122 - DNA, 26 bp, synthetic construct
  misc_feature 1..26: note = Description of Artificial Sequence: Synthetic oligonucleotide for constructing gRNA expression plasmid
  source 1..26: mol_type = other DNA
acaccgatgccgtagttctgcttgtg

SEQ ID NO: 123 - DNA, 26 bp, synthetic construct
  misc_feature 1..26: note = Description of Artificial Sequence: Synthetic oligonucleotide for constructing gRNA expression plasmid
  source 1..26: mol_type = other DNA
acaccgatgcccatcttctgcttgtg

SEQ ID NO: 124 - DNA, 26 bp, synthetic construct
  misc_feature 1..26: note = Description of Artificial Sequence: Synthetic oligonucleotide for constructing gRNA expression plasmid
  source 1..26: mol_type = other DNA
acaccgatggggttcttctgcttgtg

SEQ ID NO: 125 - DNA, 26 bp, synthetic construct
  misc_feature 1..26: note = Description of Artificial Sequence: Synthetic oligonucleotide for constructing gRNA expression plasmid
  source 1..26: mol_type = other DNA
acaccgaacccgttcttctgcttgtg

SEQ ID NO: 126 - DNA, 26 bp, synthetic construct
  misc_feature 1..26: note = Description of Artificial Sequence: Synthetic oligonucleotide for constructing gRNA expression plasmid
  source 1..26: mol_type = other DNA
acaccgtagccgttcttctgcttgtg

SEQ ID NO: 127 - DNA, 26 bp, synthetic construct
  misc_feature 1..26: note = Description of Artificial Sequence: Synthetic oligonucleotide for constructing gRNA expression plasmid
  source 1..26: mol_type = other DNA
acaccgtacccgttcttctgcttgtg

SEQ ID NO: 128 - DNA, 26 bp, synthetic construct
  misc_feature 1..26: note = Description of Artificial Sequence: Synthetic oligonucleotide for constructing gRNA expression plasmid
  source 1..26: mol_type = other DNA
acaccgtacgcgttcttctgcttgtg

SEQ ID NO: 129 - DNA, 26 bp, synthetic construct
  misc_feature 1..26: note = Description of Artificial Sequence: Synthetic oligonucleotide for constructing gRNA expression plasmid
  source 1..26: mol_type = other DNA
acaccgtacgggttcttctgcttgtg

SEQ ID NO: 130 - DNA, 26 bp, synthetic construct
  misc_feature 1..26: note = Description of Artificial Sequence: Synthetic oligonucleotide for constructing gRNA expression plasmid
  source 1..26: mol_type = other DNA
acaccgtacggcttcttctgcttgtg

SEQ ID NO: 131 - DNA, 26 bp, synthetic construct
  misc_feature 1..26: note = Description of Artificial Sequence: Synthetic oligonucleotide for constructing gRNA expression plasmid
  source 1..26: mol_type = other DNA
acaccgtacggcatcttctgcttgtg

SEQ ID NO: 132 - DNA, 26 bp, synthetic construct
  misc_feature 1..26: note = Description of Artificial Sequence: Synthetic oligonucleotide for constructing gRNA expression plasmid
  source 1..26: mol_type = other DNA
acaccgtacggcaacttctgcttgtg

SEQ ID NO: 133 - DNA, 26 bp, synthetic construct
  misc_feature 1..26: note = Description of Artificial Sequence: Synthetic oligonucleotide for constructing gRNA expression plasmid
  source 1..26: mol_type = other DNA
acaccgtacggcaagttctgcttgtg

SEQ ID NO: 134 - DNA, 26 bp, synthetic construct
  misc_feature 1..26: note = Description of Artificial Sequence: Synthetic oligonucleotide for constructing gRNA expression plasmid
  source 1..26: mol_type = other DNA
acaccgatgccgttcttctgctagag

SEQ ID NO: 135 - DNA, 26 bp, synthetic construct
  misc_feature 1..26: note = Description of Artificial Sequence: Synthetic oligonucleotide for constructing gRNA expression plasmid
  source 1..26: mol_type = other DNA
acaccgatgccgttcttctggtagtg

SEQ ID NO: 136 - DNA, 26 bp, synthetic construct
  misc_feature 1..26: note = Description of Artificial Sequence: Synthetic oligonucleotide for constructing gRNA expression plasmid
  source 1..26: mol_type = other DNA
acaccgatgccgttcttcagctagtg

SEQ ID NO: 137 - DNA, 26 bp, synthetic construct
  misc_feature 1..26: note = Description of Artificial Sequence: Synthetic oligonucleotide for constructing gRNA expression plasmid
  source 1..26: mol_type = other DNA
acaccgatgccgttctactgctagtg

SEQ ID NO: 138 - DNA, 26 bp, synthetic construct
  misc_feature 1..26: note = Description of Artificial Sequence: Synthetic oligonucleotide for constructing gRNA expression plasmid
  source 1..26: mol_type = other DNA
acaccgatgccgttgttctgctagtg

SEQ ID NO: 139 - DNA, 26 bp, synthetic construct
  misc_feature 1..26: note = Description of Artificial Sequence: Synthetic oligonucleotide for constructing gRNA expression plasmid
  source 1..26: mol_type = other DNA
acaccgatgccgatcttctgctagtg

SEQ ID NO: 140 - DNA, 26 bp, synthetic construct
  misc_feature 1..26: note = Description of Artificial Sequence: Synthetic oligonucleotide for constructing gRNA expression plasmid
  source 1..26: mol_type = other DNA
acaccgatgcggttcttctgctagtg

SEQ ID NO: 141 - DNA, 26 bp, synthetic construct
  misc_feature 1..26: note = Description of Artificial Sequence: Synthetic oligonucleotide for constructing gRNA expression plasmid
  source 1..26: mol_type = other DNA
acaccgatcccgttcttctgctagtg

SEQ ID NO: 142 - DNA, 26 bp, synthetic construct
  misc_feature 1..26: note = Description of Artificial Sequence: Synthetic oligonucleotide for constructing gRNA expression plasmid
  source 1..26: mol_type = other DNA
acaccgttgccgttcttctgctagtg

SEQ ID NO: 143 - DNA, 26 bp, synthetic construct
  misc_feature 1..26: note = Description of Artificial Sequence: Synthetic oligonucleotide for constructing gRNA expression plasmid
  source 1..26: mol_type = other DNA
acaccgatgccgttgttctgcttgag

SEQ ID NO: 144 - DNA, 26 bp, synthetic construct
  misc_feature 1..26: note = Description of Artificial Sequence: Synthetic oligonucleotide for constructing gRNA expression plasmid
  source 1..26: mol_type = other DNA
acaccgatgccgttgttctggttgtg

SEQ ID NO: 145 - DNA, 26 bp, synthetic construct
  misc_feature 1..26: note = Description of Artificial Sequence: Synthetic oligonucleotide for constructing gRNA expression plasmid
  source 1..26: mol_type = other DNA
acaccgatgccgttgttcagcttgtg

SEQ ID NO: 146 - DNA, 26 bp, synthetic construct
  misc_feature 1..26: note = Description of Artificial Sequence: Synthetic oligonucleotide for constructing gRNA expression plasmid
  source 1..26: mol_type = other DNA
acaccgatgccgttgtactgcttgtg

SEQ ID NO: 147 - DNA, 26 bp, synthetic construct
  misc_feature 1..26: note = Description of Artificial Sequence: Synthetic oligonucleotide for constructing gRNA expression plasmid
  source 1..26: mol_type = other DNA
acaccgatgccgatgttctgcttgtg

SEQ ID NO: 148 - DNA, 26 bp, synthetic construct
  misc_feature 1..26: note = Description of Artificial Sequence: Synthetic oligonucleotide for constructing gRNA expression plasmid
  source 1..26: mol_type = other DNA
acaccgatgcggttgttctgcttgtg

SEQ ID NO: 149 - DNA, 26 bp, synthetic construct
  misc_feature 1..26: note = Description of Artificial Sequence: Synthetic oligonucleotide for constructing gRNA expression plasmid
  source 1..26: mol_type = other DNA
acaccgatcccgttgttctgcttgtg

SEQ ID NO: 150 - DNA, 26 bp, synthetic construct
  misc_feature 1..26: note = Description of Artificial Sequence: Synthetic oligonucleotide for constructing gRNA expression plasmid
  source 1..26: mol_type = other DNA
acaccgttgccgttgttctgcttgtg

SEQ ID NO: 151 - DNA, 26 bp, synthetic construct
  misc_feature 1..26: note = Description of Artificial Sequence: Synthetic oligonucleotide for constructing gRNA expression plasmid
  source 1..26: mol_type = other DNA
acaccgttgccgttcttctgcttgag

SEQ ID NO: 152 - DNA, 26 bp, synthetic construct
  misc_feature 1..26: note = Description of Artificial Sequence: Synthetic oligonucleotide for constructing gRNA expression plasmid
  source 1..26: mol_type = other DNA
acaccgttgccgttcttctggttgtg

SEQ ID NO: 153 - DNA, 26 bp, synthetic construct
  misc_feature 1..26: note = Description of Artificial Sequence: Synthetic oligonucleotide for constructing gRNA expression plasmid
  source 1..26: mol_type = other DNA
acaccgttgccgttcttcagcttgtg

SEQ ID NO: 154 - DNA, 26 bp, synthetic construct
  misc_feature 1..26: note = Description of Artificial Sequence: Synthetic oligonucleotide for constructing gRNA expression plasmid
  source 1..26: mol_type = other DNA
acaccgttgccgttctactgcttgtg

SEQ ID NO: 155 - DNA, 26 bp, synthetic construct
  misc_feature 1..26: note = Description of Artificial Sequence: Synthetic oligonucleotide for constructing gRNA expression plasmid
  source 1..26: mol_type = other DNA
acaccgttgccgatcttctgcttgtg

SEQ ID NO: 156 - DNA, 26 bp, synthetic construct
  misc_feature 1..26: note = Description of Artificial Sequence: Synthetic oligonucleotide for constructing gRNA expression plasmid
  source 1..26: mol_type = other DNA
acaccgttgcggttcttctgcttgtg

SEQ ID NO: 157 - DNA, 26 bp, synthetic construct
  misc_feature 1..26: note = Description of Artificial Sequence: Synthetic oligonucleotide for constructing gRNA expression plasmid
  source 1..26: mol_type = other DNA
acaccgttcccgttcttctgcttgtg

SEQ ID NO: 158 - DNA, 26 bp, synthetic construct
  misc_feature 1..26: note = Description of Artificial Sequence: Synthetic oligonucleotide for constructing gRNA expression plasmid
  source 1..26: mol_type = other DNA
acaccggtggtgcagatgaacttcag

SEQ ID NO: 159 - DNA, 26 bp, synthetic construct
  misc_feature 1..26: note = Description of Artificial Sequence: Synthetic oligonucleotide for constructing gRNA expression plasmid
  source 1..26: mol_type = other DNA
acaccggtggtgcagatgaacttctg

SEQ ID NO: 160 - DNA, 26 bp, synthetic construct
  misc_feature 1..26: note = Description of Artificial Sequence: Synthetic oligonucleotide for constructing gRNA expression plasmid
  source 1..26: mol_type = other DNA
acaccggtggtgcagatgaacttgag

SEQ ID NO: 161 - DNA, 26 bp, synthetic construct
  misc_feature 1..26: note = Description of Artificial Sequence: Synthetic oligonucleotide for constructing gRNA expression plasmid
  source 1..26: mol_type = other DNA
acaccggtggtgcagatgaactacag

SEQ ID NO: 162 - DNA, 26 bp, synthetic construct
  misc_feature 1..26: note = Description of Artificial Sequence: Synthetic oligonucleotide for constructing gRNA expression plasmid
  source 1..26: mol_type = other DNA
acaccggtggtgcagatgaacatcag

SEQ ID NO: 163 - DNA, 26 bp, synthetic construct
  misc_feature 1..26: note = Description of Artificial Sequence: Synthetic oligonucleotide for constructing gRNA expression plasmid
  source 1..26: mol_type = other DNA
acaccggtggtgcagatgaagttcag

SEQ ID NO: 164 - DNA, 26 bp, synthetic construct
  misc_feature 1..26: note = Description of Artificial Sequence: Synthetic oligonucleotide for constructing gRNA expression plasmid
  source 1..26: mol_type = other DNA
acaccggtggtgcagatgatcttcag

SEQ ID NO: 165 - DNA, 26 bp, synthetic construct
  misc_feature 1..26: note = Description of Artificial Sequence: Synthetic oligonucleotide for constructing gRNA expression plasmid
  source 1..26: mol_type = other DNA
acaccggtggtgcagatgtacttcag

SEQ ID NO: 166 - DNA, 26 bp, synthetic construct
  misc_feature 1..26: note = Description of Artificial Sequence: Synthetic oligonucleotide for constructing gRNA expression plasmid
  source 1..26: mol_type = other DNA
acaccggtggtgcagatcaacttcag

SEQ ID NO: 167 - DNA, 26 bp, synthetic construct
  misc_feature 1..26: note = Description of Artificial Sequence: Synthetic oligonucleotide for constructing gRNA expression plasmid
  source 1..26: mol_type = other DNA
acaccggtggtgcagaagaacttcag

SEQ ID NO: 168 - DNA, 26 bp, synthetic construct
  misc_feature 1..26: note = Description of Artificial Sequence: Synthetic oligonucleotide for constructing gRNA expression plasmid
  source 1..26: mol_type = other DNA
acaccggtggtgcagttgaacttcag

SEQ ID NO: 169 - DNA, 26 bp, synthetic construct
  misc_feature 1..26: note = Description of Artificial Sequence: Synthetic oligonucleotide for constructing gRNA expression plasmid
  source 1..26: mol_type = other DNA
acaccggtggtgcacatgaacttcag

SEQ ID NO: 170 - DNA, 26 bp, synthetic construct
  misc_feature 1..26: note = Description of Artificial Sequence: Synthetic oligonucleotide for constructing gRNA expression plasmid
  source 1..26: mol_type = other DNA
acaccggtggtgctgatgaacttcag

SEQ ID NO: 171 - DNA, 26 bp, synthetic construct
  misc_feature 1..26: note = Description of Artificial Sequence: Synthetic oligonucleotide for constructing gRNA expression plasmid
  source 1..26: mol_type = other DNA
acaccggtggtggagatgaacttcag

SEQ ID NO: 172 - DNA, 26 bp, synthetic construct
  misc_feature 1..26: note = Description of Artificial Sequence: Synthetic oligonucleotide for constructing gRNA expression plasmid
  source 1..26: mol_type = other DNA
acaccggtggtccagatgaacttcag

SEQ ID NO: 173 - DNA, 26 bp, synthetic construct
  misc_feature 1..26: note = Description of Artificial Sequence: Synthetic oligonucleotide for constructing gRNA expression plasmid
  source 1..26: mol_type = other DNA
acaccggtggagcagatgaacttcag

SEQ ID NO: 174 - DNA, 26 bp, synthetic construct
  misc_feature 1..26: note = Description of Artificial Sequence: Synthetic oligonucleotide for constructing gRNA expression plasmid
  source 1..26: mol_type = other DNA
acaccggtgctgcagatgaacttcag

SEQ ID NO: 175 - DNA, 26 bp, synthetic construct
  misc_feature 1..26: note = Description of Artificial Sequence: Synthetic oligonucleotide for constructing gRNA expression plasmid
  source 1..26: mol_type = other DNA
acaccggtcgtgcagatgaacttcag

SEQ ID NO: 176 - DNA, 26 bp, synthetic construct
  misc_feature 1..26: note = Description of Artificial Sequence: Synthetic oligonucleotide for constructing gRNA expression plasmid
  source 1..26: mol_type = other DNA
acaccggaggtgcagatgaacttcag

SEQ ID NO: 177 - DNA, 26 bp, synthetic construct
  misc_feature 1..26: note = Description of Artificial Sequence: Synthetic oligonucleotide for constructing gRNA expression plasmid
  source 1..26: mol_type = other DNA
acaccgctggtgcagatgaacttcag

SEQ ID NO: 178 - DNA, 26 bp, synthetic construct
  misc_feature 1..26: note = Description of Artificial Sequence: Synthetic oligonucleotide for constructing gRNA expression plasmid
  source 1..26: mol_type = other DNA
acaccggtggtgcagatgaacttgtg

SEQ ID NO: 179 - DNA, 26 bp, synthetic construct
  misc_feature 1..26: note = Description of Artificial Sequence: Synthetic oligonucleotide for constructing gRNA expression plasmid
  source 1..26: mol_type = other DNA
acaccggtggtgcagatgaacaacag

SEQ ID NO: 180 - DNA, 26 bp, synthetic construct
  misc_feature 1..26: note = Description of Artificial Sequence: Synthetic oligonucleotide for constructing gRNA expression plasmid
  source 1..26: mol_type = other DNA
acaccggtggtgcagatgatgttcag

SEQ ID NO: 181 - DNA, 26 bp, synthetic construct
  misc_feature 1..26: note = Description of Artificial Sequence: Synthetic oligonucleotide for constructing gRNA expression plasmid
  source 1..26: mol_type = other DNA
acaccggtggtgcagatctacttcag

SEQ ID NO: 182 - DNA, 26 bp, synthetic construct
  misc_feature 1..26: note = Description of Artificial Sequence: Synthetic oligonucleotide for constructing gRNA expression plasmid
  source 1..26: mol_type = other DNA
acaccggtggtgcagtagaacttcag

SEQ ID NO: 183 - DNA, 26 bp, synthetic construct
  misc_feature 1..26: note = Description of Artificial Sequence: Synthetic oligonucleotide for constructing gRNA expression plasmid
  source 1..26: mol_type = other DNA
acaccggtggtgctcatgaacttcag

SEQ ID NO: 184 - DNA, 26 bp, synthetic construct
  misc_feature 1..26: note = Description of Artificial Sequence: Synthetic oligonucleotide for constructing gRNA expression plasmid
  source 1..26: mol_type = other DNA
acaccggtggtcgagatgaacttcag

SEQ ID NO: 185 - DNA, 26 bp, synthetic construct
  misc_feature 1..26: note = Description of Artificial Sequence: Synthetic oligonucleotide for constructing gRNA expression plasmid
  source 1..26: mol_type = other DNA
acaccggtgcagcagatgaacttcag

SEQ ID NO: 186 - DNA, 26 bp, synthetic construct
  misc_feature 1..26: note = Description of Artificial Sequence: Synthetic oligonucleotide for constructing gRNA expression plasmid
  source 1..26: mol_type = other DNA
acaccggacgtgcagatgaacttcag

SEQ ID NO: 187 - DNA, 26 bp, synthetic construct
  misc_feature 1..26: note = Description of Artificial Sequence: Synthetic oligonucleotide for constructing gRNA expression plasmid
  source 1..26: mol_type = other DNA
acaccgcaggtgcagatgaacttcag

SEQ ID NO: 188 - DNA, 26 bp, synthetic construct
  misc_feature 1..26: note = Description of Artificial Sequence: Synthetic oligonucleotide for constructing gRNA expression plasmid
  source 1..26: mol_type = other DNA
acaccgcacgtgcagatgaacttcag

SEQ ID NO: 189 - DNA, 26 bp, synthetic construct
  misc_feature 1..26: note = Description of Artificial Sequence: Synthetic oligonucleotide for constructing gRNA expression plasmid
  source 1..26: mol_type = other DNA
acaccgcacctgcagatgaacttcag

SEQ ID NO: 190 - DNA, 26 bp, synthetic construct
  misc_feature 1..26: note = Description of Artificial Sequence: Synthetic oligonucleotide for constructing gRNA expression plasmid
  source 1..26: mol_type = other DNA
acaccgcaccagcagatgaacttcag

SEQ ID NO: 191 - DNA, 26 bp, synthetic construct
  misc_feature 1..26: note = Description of Artificial Sequence: Synthetic oligonucleotide for constructing gRNA expression plasmid
  source 1..26: mol_type = other DNA
acaccgcaccaccagatgaacttcag

SEQ ID NO: 192 - DNA, 26 bp, synthetic construct
  misc_feature 1..26: note = Description of Artificial Sequence: Synthetic oligonucleotide for constructing gRNA expression plasmid
  source 1..26: mol_type = other DNA
acaccgcaccacgagatgaacttcag

SEQ ID NO: 193 - DNA, 26 bp, synthetic construct
  misc_feature 1..26: note = Description of Artificial Sequence: Synthetic oligonucleotide for constructing gRNA expression plasmid
  source 1..26: mol_type = other DNA
acaccgcaccacgtgatgaacttcag

SEQ ID NO: 194 - DNA, 26 bp, synthetic construct
  misc_feature 1..26: note = Description of Artificial Sequence: Synthetic oligonucleotide for constructing gRNA expression plasmid
  source 1..26: mol_type = other DNA
acaccgcaccacgtcatgaacttcag

SEQ ID NO: 195 - DNA, 26 bp, synthetic construct
  misc_feature 1..26: note = Description of Artificial Sequence: Synthetic oligonucleotide for constructing gRNA expression plasmid
  source 1..26: mol_type = other DNA
acaccggtggtgcagatgaactactg

SEQ ID NO: 196 - DNA, 26 bp, synthetic construct
  misc_feature 1..26: note = Description of Artificial Sequence: Synthetic oligonucleotide for constructing gRNA expression plasmid
  source 1..26: mol_type = other DNA
acaccggtggtgcagatgaagtacag

SEQ ID NO: 197 - DNA, 26 bp, synthetic construct
  misc_feature 1..26: note = Description of Artificial Sequence: Synthetic oligonucleotide for constructing gRNA expression plasmid
  source 1..26: mol_type = other DNA
acaccggtggtgcagatgtactacag

SEQ ID NO: 198 - DNA, 26 bp, synthetic construct
  misc_feature 1..26: note = Description of Artificial Sequence: Synthetic oligonucleotide for constructing gRNA expression plasmid
  source 1..26: mol_type = other DNA
acaccggtggtgcagaagaactacag

SEQ ID NO: 199 - DNA, 26 bp, synthetic construct
  misc_feature 1..26: note = Description of Artificial Sequence: Synthetic oligonucleotide for constructing gRNA expression plasmid
  source 1..26: mol_type = other DNA
acaccggtggtgcacatgaactacag

SEQ ID NO: 200 - DNA, 26 bp, synthetic construct
  misc_feature 1..26: note = Description of Artificial Sequence: Synthetic oligonucleotide for constructing gRNA expression plasmid
  source 1..26: mol_type = other DNA
acaccggtggtggagatgaactacag

SEQ ID NO: 201 - DNA, 26 bp, synthetic construct
  misc_feature 1..26: note = Description of Artificial Sequence: Synthetic oligonucleotide for constructing gRNA expression plasmid
  source 1..26: mol_type = other DNA
acaccggtggagcagatgaactacag

SEQ ID NO: 202 - DNA, 26 bp, synthetic construct
  misc_feature 1..26: note = Description of Artificial Sequence: Synthetic oligonucleotide for constructing gRNA expression plasmid
  source 1..26: mol_type = other DNA
acaccggtcgtgcagatgaactacag

SEQ ID NO: 203 - DNA, 26 bp, synthetic construct
  misc_feature 1..26: note = Description of Artificial Sequence: Synthetic oligonucleotide for constructing gRNA expression plasmid
  source 1..26: mol_type = other DNA
acaccgctggtgcagatgaactacag

SEQ ID NO: 204 - DNA, 26 bp, synthetic construct
  misc_feature 1..26: note = Description of Artificial Sequence: Synthetic oligonucleotide for constructing gRNA expression plasmid
  source 1..26: mol_type = other DNA
acaccggtggtgcacatgaacttctg

SEQ ID NO: 205 - DNA, 26 bp, synthetic construct
  misc_feature 1..26: note = Description of Artificial Sequence: Synthetic oligonucleotide for constructing gRNA expression plasmid
  source 1..26: mol_type = other DNA
acaccggtggtgcacatgaagttcag

SEQ ID NO: 206 - DNA, 26 bp, synthetic construct
  misc_feature 1..26: note = Description of Artificial Sequence: Synthetic oligonucleotide for constructing gRNA expression plasmid
  source 1..26: mol_type = other DNA
acaccggtggtgcacatgtacttcag

SEQ ID NO: 207 - DNA, 26 bp, synthetic construct
  misc_feature 1..26: note = Description of Artificial Sequence: Synthetic oligonucleotide for constructing gRNA expression plasmid
  source 1..26: mol_type = other DNA
acaccggtggtgcacaagaacttcag

SEQ ID NO: 208 - DNA, 26 bp, synthetic construct
  misc_feature 1..26: note = Description of Artificial Sequence: Synthetic oligonucleotide for constructing gRNA expression plasmid
  source 1..26: mol_type = other DNA
acaccggtggtggacatgaacttcag

SEQ ID NO: 209 - DNA, 26 bp, synthetic construct
  misc_feature 1..26: note = Description of Artificial Sequence: Synthetic oligonucleotide for constructing gRNA expression plasmid
  source 1..26: mol_type = other DNA
acaccggtggagcacatgaacttcag

SEQ ID NO: 210 - DNA, 26 bp, synthetic construct
  misc_feature 1..26: note = Description of Artificial Sequence: Synthetic oligonucleotide for constructing gRNA expression plasmid
  source 1..26: mol_type = other DNA
acaccggtcgtgcacatgaacttcag

SEQ ID NO: 211 - DNA, 26 bp, synthetic construct
  misc_feature 1..26: note = Description of Artificial Sequence: Synthetic oligonucleotide for constructing gRNA expression plasmid
  source 1..26: mol_type = other DNA
acaccgctggtgcacatgaacttcag

SEQ ID NO: 212 - DNA, 26 bp, synthetic construct
  misc_feature 1..26: note = Description of Artificial Sequence: Synthetic oligonucleotide for constructing gRNA expression plasmid
  source 1..26: mol_type = other DNA
acaccgctggtgcagatgaacttctg

SEQ ID NO: 213 - DNA, 26 bp, synthetic construct
  misc_feature 1..26: note = Description of Artificial Sequence: Synthetic oligonucleotide for constructing gRNA expression plasmid
  source 1..26: mol_type = other DNA
acaccgctggtgcagatgaagttcag

SEQ ID NO: 214 - DNA, 26 bp, synthetic construct
  misc_feature 1..26: note = Description of Artificial Sequence: Synthetic oligonucleotide for constructing gRNA expression plasmid
  source 1..26: mol_type = other DNA
acaccgctggtgcagatgtacttcag

SEQ ID NO: 215 - DNA, 26 bp, synthetic construct
  misc_feature 1..26: note = Description of Artificial Sequence: Synthetic oligonucleotide for constructing gRNA expression plasmid
  source 1..26: mol_type = other DNA
acaccgctggtgcagaagaacttcag

SEQ ID NO: 216 - DNA, 26 bp, synthetic construct
  misc_feature 1..26: note = Description of Artificial Sequence: Synthetic oligonucleotide for constructing gRNA expression plasmid
  source 1..26: mol_type = other DNA
acaccgctggtggagatgaacttcag

SEQ ID NO: 217 - DNA, 26 bp, synthetic construct
  misc_feature 1..26: note = Description of Artificial Sequence: Synthetic oligonucleotide for constructing gRNA expression plasmid
  source 1..26: mol_type = other DNA
acaccgctggagcagatgaacttcag

SEQ ID NO: 218 - DNA, 26 bp, synthetic construct
  misc_feature 1..26: note = Description of Artificial Sequence: Synthetic oligonucleotide for constructing gRNA expression plasmid
  source 1..26: mol_type = other DNA
acaccgctcgtgcagatgaacttcag

SEQ ID NO: 219 - DNA, 26 bp, synthetic construct
  misc_feature 1..26: note = Description of Artificial Sequence: Synthetic oligonucleotide for constructing gRNA expression plasmid
  source 1..26: mol_type = other DNA
acaccgggtggggggagtttgctccg

SEQ ID NO: 220 - skipped

SEQ ID NO: 221 - DNA, 26 bp, synthetic construct
  misc_feature 1..26: note = Description of Artificial Sequence: Synthetic oligonucleotide for constructing gRNA expression plasmid
  source 1..26: mol_type = other DNA
acaccgaccccctccaccccgcctcg

SEQ ID NO: 222 - skipped

SEQ ID NO: 223 - DNA, 26 bp, synthetic construct
  misc_feature 1..26: note = Description of Artificial Sequence: Synthetic oligonucleotide for constructing gRNA expression plasmid
  source 1..26: mol_type = other DNA
acaccggtgagtgagtgtgtgcgtgg

SEQ ID NO: 224 - skipped

SEQ ID NO: 225 - DNA, 26 bp, synthetic construct
  misc_feature 1..26: note = Description of Artificial Sequence: Synthetic oligonucleotide for constructing gRNA expression plasmid
  source 1..26: mol_type = other DNA
acaccgagtccgagcagaagaagaag

SEQ ID NO: 226 - skipped

SEQ ID NO: 227 - DNA, 26 bp, synthetic construct
  misc_feature 1..26: note = Description of Artificial Sequence: Synthetic oligonucleotide for constructing gRNA expression plasmid
  source 1..26: mol_type = other DNA
acaccgtcatcttagtcattacctgg

SEQ ID NO: 228 - skipped

SEQ ID NO: 229 - DNA, 26 bp, synthetic construct
  misc_feature 1..26: note = Description of Artificial Sequence: Synthetic oligonucleotide for constructing gRNA expression plasmid
  source 1..26: mol_type = other DNA
acaccggaatcccttctgcagcaccg

SEQ ID NO: 230 - DNA, 26 bp, synthetic construct
  misc_feature 1..26: note = Description of Artificial Sequence: Synthetic oligonucleotide for constructing gRNA expression plasmid
  source 1..26: mol_type = other DNA
aaaacccggcaagctgcccgtgcccg

SEQ ID NO: 231 - DNA, 26 bp, synthetic construct
  misc_feature 1..26: note = Description of Artificial Sequence: Synthetic oligonucleotide for constructing gRNA expression plasmid
  source 1..26: mol_type = other DNA
aaaacgcggcaagctgcccgtgcccg

SEQ ID NO: 232 - DNA, 26 bp, synthetic construct
  misc_feature 1..26: note = Description of Artificial Sequence: Synthetic oligonucleotide for constructing gRNA expression plasmid
  source 1..26: mol_type = other DNA
aaaaccgggcaagctgcccgtgcccg

SEQ ID NO: 233 - DNA, 26 bp, synthetic construct
  misc_feature 1..26: note = Description of Artificial Sequence: Synthetic oligonucleotide for constructing gRNA expression plasmid
  source 1..26: mol_type = other DNA
aaaaccccgcaagctgcccgtgcccg

SEQ ID NO: 234 - DNA, 26 bp, synthetic construct
  misc_feature 1..26: note = Description of Artificial Sequence: Synthetic oligonucleotide for constructing gRNA expression plasmid
  source 1..26: mol_type = other DNA
aaaacccgccaagctgcccgtgcccg

SEQ ID NO: 235 - DNA, 26 bp, synthetic construct
  misc_feature 1..26: note = Description of Artificial Sequence: Synthetic oligonucleotide for constructing gRNA expression plasmid
  source 1..26: mol_type = other DNA
aaaacccgggaagctgcccgtgcccg

SEQ ID NO: 236 - DNA, 26 bp, synthetic construct
  misc_feature 1..26: note = Description of Artificial Sequence: Synthetic oligonucleotide for constructing gRNA expression plasmid
  source 1..26: mol_type = other DNA
aaaacccggctagctgcccgtgcccg

SEQ ID NO: 237 - DNA, 26 bp, synthetic construct
  misc_feature 1..26: note = Description of Artificial Sequence: Synthetic oligonucleotide for constructing gRNA expression plasmid
  source 1..26: mol_type = other DNA
aaaacccggcatgctgcccgtgcccg

SEQ ID NO: 238 - DNA, 26 bp, synthetic construct
  misc_feature 1..26: note = Description of Artificial Sequence: Synthetic oligonucleotide for constructing gRNA expression plasmid
  source 1..26: mol_type = other DNA
aaaacccggcaacctgcccgtgcccg

SEQ ID NO: 239 - DNA, 26 bp, synthetic construct
  misc_feature 1..26: note = Description of Artificial Sequence: Synthetic oligonucleotide for constructing gRNA expression plasmid
  source 1..26: mol_type = other DNA
aaaacccggcaaggtgcccgtgcccg

SEQ ID NO: 240 - DNA, 26 bp, synthetic construct
  misc_feature 1..26: note = Description of Artificial Sequence: Synthetic oligonucleotide for constructing gRNA expression plasmid
  source 1..26: mol_type = other DNA
aaaacccggcaagcagcccgtgcccg

SEQ ID NO: 241 - DNA, 26 bp, synthetic construct
  misc_feature 1..26: note = Description of Artificial Sequence: Synthetic oligonucleotide for constructing gRNA expression plasmid
  source 1..26: mol_type = other DNA
aaaacccggcaagctccccgtgcccg

SEQ ID NO: 242 - DNA, 26 bp, synthetic construct
  misc_feature 1..26: note = Description of Artificial Sequence: Synthetic oligonucleotide for constructing gRNA expression plasmid
  source 1..26: mol_type = other DNA
aaaacccggcaagctggccgtgcccg

SEQ ID NO: 243 - DNA, 26 bp, synthetic construct
  misc_feature 1..26: note = Description of Artificial Sequence: Synthetic oligonucleotide for constructing gRNA expression plasmid
  source 1..26: mol_type = other DNA
aaaacccggcaagctgcgcgtgcccg

SEQ ID NO: 244 - DNA, 26 bp, synthetic construct
  misc_feature 1..26: note = Description of Artificial Sequence: Synthetic oligonucleotide for constructing gRNA expression plasmid
  source 1..26: mol_type = other DNA
aaaacccggcaagctgccggtgcccg

SEQ ID NO: 245 - DNA, 26 bp, synthetic construct
  misc_feature 1..26: note = Description of Artificial Sequence: Synthetic oligonucleotide for constructing gRNA expression plasmid
  source 1..26: mol_type = other DNA
aaaacccggcaagctgcccctgcccg

SEQ ID NO: 246 - DNA, 26 bp, synthetic construct
  misc_feature 1..26: note = Description of Artificial Sequence: Synthetic oligonucleotide for constructing gRNA expression plasmid
  source 1..26: mol_type = other DNA
aaaacccggcaagctgcccgagcccg

SEQ ID NO: 247 - DNA, 26 bp, synthetic construct
  misc_feature 1..26: note = Description of Artificial Sequence: Synthetic oligonucleotide for constructing gRNA expression plasmid
  source 1..26: mol_type = other DNA
aaaacccggcaagctgcccgtccccg

SEQ ID NO: 248 - DNA, 26 bp, synthetic construct
  misc_feature 1..26: note = Description of Artificial Sequence: Synthetic oligonucleotide for constructing gRNA expression plasmid
  source 1..26: mol_type = other DNA
aaaacccggcaagctgcccgtggccg

SEQ ID NO: 249 - DNA, 26 bp, synthetic construct
  misc_feature 1..26: note = Description of Artificial Sequence: Synthetic oligonucleotide for constructing gRNA expression plasmid
  source 1..26: mol_type = other DNA
aaaacccggcaagctgcccgtgcgcg

SEQ ID NO: 250 - DNA, 26 bp, synthetic construct
  misc_feature 1..26: note = Description of Artificial Sequence: Synthetic oligonucleotide for constructing gRNA expression plasmid
  source 1..26: mol_type = other DNA
aaaacggggcaagctgcccgtgcccg

SEQ ID NO: 251 - DNA, 26 bp, synthetic construct
  misc_feature 1..26: note = Description of Artificial Sequence: Synthetic oligonucleotide for constructing gRNA expression plasmid
  source 1..26: mol_type = other DNA
aaaaccccccaagctgcccgtgcccg

SEQ ID NO: 252 - DNA, 26 bp, synthetic construct
  misc_feature 1..26: note = Description of Artificial Sequence: Synthetic oligonucleotide for constructing gRNA expression plasmid
  source 1..26: mol_type = other DNA
aaaacccgggtagctgcccgtgcccg

SEQ ID NO: 253 - DNA, 26 bp, synthetic construct
  misc_feature 1..26: note = Description of Artificial Sequence: Synthetic oligonucleotide for constructing gRNA expression plasmid
  source 1..26: mol_type = other DNA
aaaacccggcatcctgcccgtgcccg

SEQ ID NO: 254 - DNA, 26 bp, synthetic construct
  misc_feature 1..26: note = Description of Artificial Sequence: Synthetic oligonucleotide for constructing gRNA expression plasmid
  source 1..26: mol_type = other DNA
aaaacccggcaaggagcccgtgcccg

SEQ ID NO: 255 - DNA, 26 bp, synthetic construct
  misc_feature 1..26: note = Description of Artificial Sequence: Synthetic oligonucleotide for constructing gRNA expression plasmid
  source 1..26: mol_type = other DNA
aaaacccggcaagctcgccgtgcccg

SEQ ID NO: 256 - DNA, 26 bp, synthetic construct
  misc_feature 1..26: note = Description of Artificial Sequence: Synthetic oligonucleotide for constructing gRNA expression plasmid
  source 1..26: mol_type = other DNA
aaaacccggcaagctgcgggtgcccg

SEQ ID NO: 257 - DNA, 26 bp, synthetic construct
  misc_feature 1..26: note = Description of Artificial Sequence: Synthetic oligonucleotide for constructing gRNA expression plasmid
  source 1..26: mol_type = other DNA
aaaacccggcaagctgccccagcccg

SEQ ID NO: 258 - DNA, 26 bp, synthetic construct
  misc_feature 1..26: note = Description of Artificial Sequence: Synthetic oligonucleotide for constructing gRNA expression plasmid
  source 1..26: mol_type = other DNA
aaaacccggcaagctgcccgtcgccg

SEQ ID NO: 259 - DNA, 26 bp, synthetic construct
  misc_feature 1..26: note = Description of Artificial Sequence: Synthetic oligonucleotide for constructing gRNA expression plasmid
  source 1..26: mol_type = other DNA
aaaacccggcaagctgcccgtgcggg

SEQ ID NO: 260 - DNA, 26 bp, synthetic construct
  misc_feature 1..26: note = Description of Artificial Sequence: Synthetic oligonucleotide for constructing gRNA expression plasmid
  source 1..26: mol_type = other DNA
aaaacccggcaagctgcccgtgcccg

SEQ ID NO: 261 - DNA, 26 bp, synthetic construct
  misc_feature 1..26: note = Description of Artificial Sequence: Synthetic oligonucleotide for constructing gRNA expression plasmid
  source 1..26: mol_type = other DNA
aaaacccggcaagctgcccgtgcccg

SEQ ID NO: 262 - DNA, 26 bp, synthetic construct
  misc_feature 1..26: note = Description of Artificial Sequence: Synthetic oligonucleotide for constructing gRNA expression plasmid
  source 1..26: mol_type = other DNA
aaaacccggcaagctgcccgtgcccg

SEQ ID NO: 263 - DNA, 26 bp, synthetic construct
  misc_feature 1..26: note = Description of Artificial Sequence: Synthetic oligonucleotide for constructing gRNA expression plasmid
  source 1..26: mol_type = other DNA
aaaacccggcaagctgcccgtgcccg

SEQ ID NO: 264 - DNA, 26 bp, synthetic construct
  misc_feature 1..26: note = Description of Artificial Sequence: Synthetic oligonucleotide for constructing gRNA expression plasmid
  source 1..26: mol_type = other DNA
aaaacccggcaagctgcccgtgcccg

SEQ ID NO: 265 - DNA, 26 bp, synthetic construct
  misc_feature 1..26: note = Description of Artificial Sequence: Synthetic oligonucleotide for constructing gRNA expression plasmid
  source 1..26: mol_type = other DNA
aaaacccggcaagctgcccgtgcccg

SEQ ID NO: 266 - DNA, 26 bp, synthetic construct
  misc_feature 1..26: note = Description of Artificial Sequence: Synthetic oligonucleotide for constructing gRNA expression plasmid
  source 1..26: mol_type = other DNA
aaaacccggcaagctgcccgtgcccg

SEQ ID NO: 267 - DNA, 26 bp, synthetic construct
  misc_feature 1..26: note = Description of Artificial Sequence: Synthetic oligonucleotide for constructing gRNA expression plasmid
  source 1..26: mol_type = other DNA
aaaacgccgcaagctgcccgtgcccg

SEQ ID NO: 268 - DNA, 26 bp, synthetic construct
  misc_feature 1..26: note = Description of Artificial Sequence: Synthetic oligonucleotide for constructing gRNA expression plasmid
  source 1..26: mol_type = other DNA
aaaaccccggaagctgcccgtgcccg

SEQ ID NO: 269 - DNA, 26 bp, synthetic construct
  misc_feature 1..26: note = Description of Artificial Sequence: Synthetic oligonucleotide for constructing gRNA expression plasmid
  source 1..26: mol_type = other DNA
aaaaccccgcatgctgcccgtgcccg

SEQ ID NO: 270 - DNA, 26 bp, synthetic construct
  misc_feature 1..26: note = Description of Artificial Sequence: Synthetic oligonucleotide for constructing gRNA expression plasmid
  source 1..26: mol_type = other DNA
aaaaccccgcaaggtgcccgtgcccg

SEQ ID NO: 271 - DNA, 26 bp, synthetic construct
  misc_feature 1..26: note = Description of Artificial Sequence: Synthetic oligonucleotide for constructing gRNA expression plasmid
  source 1..26: mol_type = other DNA
aaaaccccgcaagctccccgtgcccg

SEQ ID NO: 272 - DNA, 26 bp, synthetic construct
  misc_feature 1..26: note = Description of Artificial Sequence: Synthetic oligonucleotide for constructing gRNA expression plasmid
  source 1..26: mol_type = other DNA
aaaaccccgcaagctgcgcgtgcccg

SEQ ID NO: 273 - DNA, 26 bp, synthetic construct
  misc_feature 1..26: note = Description of Artificial Sequence: Synthetic oligonucleotide for constructing gRNA expression plasmid
  source 1..26: mol_type = other DNA
aaaaccccgcaagctgcccctgcccg

SEQ ID NO: 274 - DNA, 26 bp, synthetic construct
  misc_feature 1..26: note = Description of Artificial Sequence: Synthetic oligonucleotide for constructing gRNA expression plasmid
  source 1..26: mol_type = other DNA
aaaaccccgcaagctgcccgtccccg

SEQ ID NO: 275 - DNA, 26 bp, synthetic construct
  misc_feature 1..26: note = Description of Artificial Sequence: Synthetic oligonucleotide for constructing gRNA expression plasmid
  source 1..26: mol_type = other DNA
aaaaccccgcaagctgcccgtgcgcg

SEQ ID NO: 276 - DNA, 26 bp, synthetic construct
  misc_feature 1..26: note = Description of Artificial Sequence: Synthetic oligonucleotide for constructing gRNA expression plasmid
  source 1..26: mol_type = other DNA
aaaacgcggcaagctccccgtgcccg

SEQ ID NO: 277 - DNA, 26 bp, synthetic construct
  misc_feature 1..26: note = Description of Artificial Sequence: Synthetic oligonucleotide for constructing gRNA expression plasmid
  source 1..26: mol_type = other DNA
aaaacccgggaagctccccgtgcccg

SEQ ID NO: 278 - DNA, 26 bp, synthetic construct
  misc_feature 1..26: note = Description of Artificial Sequence: Synthetic oligonucleotide for constructing gRNA expression plasmid
  source 1..26: mol_type = other DNA
aaaacccggcatgctccccgtgcccg

SEQ ID NO: 279 - DNA, 26 bp, synthetic construct
  misc_feature 1..26: note = Description of Artificial Sequence: Synthetic oligonucleotide for constructing gRNA expression plasmid
  source 1..26: mol_type = other DNA
aaaacccggcaaggtccccgtgcccg

SEQ ID NO: 280 - DNA, 26 bp, synthetic construct
  misc_feature 1..26: note = Description of Artificial Sequence: Synthetic oligonucleotide for constructing gRNA expression plasmid
  source 1..26: mol_type = other DNA
aaaacccggcaagctccgcgtgcccg

SEQ ID NO: 281 - DNA, 26 bp, synthetic construct
  misc_feature 1..26: note = Description of Artificial Sequence: Synthetic oligonucleotide for constructing gRNA expression plasmid
  source 1..26: mol_type = other DNA
aaaacccggcaagctccccctgcccg

SEQ ID NO: 282 - DNA, 26 bp, synthetic construct
  misc_feature 1..26: note = Description of Artificial Sequence: Synthetic oligonucleotide for constructing gRNA expression plasmid
  source 1..26: mol_type = other DNA
aaaacccggcaagctccccgtccccg

SEQ ID NO: 283 - DNA, 26 bp, synthetic construct
  misc_feature 1..26: note = Description of Artificial Sequence: Synthetic oligonucleotide for constructing gRNA expression plasmid
  source 1..26: mol_type = other DNA
aaaacccggcaagctccccgtgcgcg

SEQ ID NO: 284 - DNA, 26 bp, synthetic construct
  misc_feature 1..26: note = Description of Artificial Sequence: Synthetic oligonucleotide for constructing gRNA expression plasmid
  source 1..26: mol_type = other DNA
aaaacgcggcaagctgcccgtgcgcg

SEQ ID NO: 285 - DNA, 26 bp, synthetic construct
  misc_feature 1..26: note = Description of Artificial Sequence: Synthetic oligonucleotide for constructing gRNA expression plasmid
  source 1..26: mol_type = other DNA
aaaacccgggaagctgcccgtgcgcg

SEQ ID NO: 286 - DNA, 26 bp, synthetic construct
  misc_feature 1..26: note = Description of Artificial Sequence: Synthetic oligonucleotide for constructing gRNA expression plasmid
  source 1..26: mol_type = other DNA
aaaacccggcatgctgcccgtgcgcg

SEQ ID NO: 287 - DNA, 26 bp, synthetic construct
  misc_feature 1..26: note = Description of Artificial Sequence: Synthetic oligonucleotide for constructing gRNA expression plasmid
  source 1..26: mol_type = other DNA
aaaacccggcaaggtgcccgtgcgcg

SEQ ID NO: 288 - DNA, 26 bp, synthetic construct
  misc_feature 1..26: note = Description of Artificial Sequence: Synthetic oligonucleotide for constructing gRNA expression plasmid
  source 1..26: mol_type = other DNA
aaaacccggcaagctgcgcgtgcgcg

SEQ ID NO: 289 - DNA, 26 bp, synthetic construct
  misc_feature 1..26: note = Description of Artificial Sequence: Synthetic oligonucleotide for constructing gRNA expression plasmid
  source 1..26: mol_type = other DNA
aaaacccggcaagctgcccctgcgcg

SEQ ID NO: 290 - DNA, 26 bp, synthetic construct
  misc_feature 1..26: note = Description of Artificial Sequence: Synthetic oligonucleotide for constructing gRNA expression plasmid
  source 1..26: mol_type = other DNA
aaaacccggcaagctgcccgtccgcg

SEQ ID NO: 291 - DNA, 26 bp, synthetic construct
  misc_feature 1..26: note = Description of Artificial Sequence: Synthetic oligonucleotide for constructing gRNA expression plasmid
  source 1..26: mol_type = other DNA
aaaacacaagcagaagaacggcatcg

SEQ ID NO: 292 - DNA, 26 bp, synthetic construct
  misc_feature 1..26: note = Description of Artificial Sequence: Synthetic oligonucleotide for constructing gRNA expression plasmid
  source 1..26: mol_type = other DNA
aaaacacaagcagaagaacggcatcg

SEQ ID NO: 293 - DNA, 26 bp, synthetic construct
  misc_feature 1..26: note = Description of Artificial Sequence: Synthetic oligonucleotide for constructing gRNA expression plasmid
  source 1..26: mol_type = other DNA
aaaacacaagcagaagaacggcatcg

SEQ ID NO: 294 - DNA, 26 bp, synthetic construct
  misc_feature 1..26: note = Description of Artificial Sequence: Synthetic oligonucleotide for constructing gRNA expression plasmid
  source 1..26: mol_type = other DNA
aaaacacaagcagaagaacggcatcg

SEQ ID NO: 295 - DNA, 26 bp, synthetic construct
  misc_feature 1..26: note = Description of Artificial Sequence: Synthetic oligonucleotide for constructing gRNA expression plasmid
  source 1..26: mol_type = other DNA
aaaacacaagcagaagaacggcatcg

SEQ ID NO: 296 - DNA, 26 bp, synthetic construct
  misc_feature 1..26: note = Description of Artificial Sequence: Synthetic oligonucleotide for constructing gRNA expression plasmid
  source 1..26: mol_type = other DNA
aaaacacaagcagaagaacggcatcg

SEQ ID NO: 297 - DNA, 26 bp, synthetic construct
  misc_feature 1..26: note = Description of Artificial Sequence: Synthetic oligonucleotide for constructing gRNA expression plasmid
  source 1..26: mol_type = other DNA
aaaacacaagcagaagaacggcatcg

SEQ ID NO: 298 - DNA, 26 bp, synthetic construct
  misc_feature 1..26: note = Description of Artificial Sequence: Synthetic oligonucleotide for constructing gRNA expression plasmid
  source 1..26: mol_type = other DNA
aaaacacaagcagaagaacggcatcg

SEQ ID NO: 299 - DNA, 26 bp, synthetic construct
  misc_feature 1..26: note = Description of Artificial Sequence: Synthetic oligonucleotide for constructing gRNA expression plasmid
  source 1..26: mol_type = other DNA
aaaacacaagcagaagaacggcatcg

SEQ ID NO: 300 - DNA, 26 bp, synthetic construct
  misc_feature 1..26: note = Description of Artificial Sequence: Synthetic oligonucleotide for constructing gRNA expression plasmid
  source 1..26: mol_type = other DNA
aaaacacaagcagaagaacggcatcg

SEQ ID NO: 301 - DNA, 26 bp, synthetic construct
  misc_feature 1..26: note = Description of Artificial Sequence: Synthetic oligonucleotide for constructing gRNA expression plasmid
  source 1..26: mol_type = other DNA
aaaacacaagcagaagaacggcatcg

SEQ ID NO: 302 - DNA, 26 bp, synthetic construct
  misc_feature 1..26: note = Description of Artificial Sequence: Synthetic oligonucleotide for constructing gRNA expression plasmid
  source 1..26: mol_type = other DNA
aaaacacaagcagaagaacggcatcg

SEQ ID NO: 303 - DNA, 26 bp, synthetic construct
  misc_feature 1..26: note = Description of Artificial Sequence: Synthetic oligonucleotide for constructing gRNA expression plasmid
  source 1..26: mol_type = other DNA
aaaacacaagcagaagaacggcatcg

SEQ ID NO: 304 - DNA, 26 bp, synthetic construct
  misc_feature 1..26: note = Description of Artificial Sequence: Synthetic oligonucleotide for constructing gRNA expression plasmid
  source 1..26: mol_type = other DNA
aaaacacaagcagaagaacggcatcg

SEQ ID NO: 305 - DNA, 26 bp, synthetic construct
  misc_feature 1..26: note = Description of Artificial Sequence: Synthetic oligonucleotide for constructing gRNA expression plasmid
  source 1..26: mol_type = other DNA
aaaacacaagcagaagaacggcatcg

SEQ ID NO: 306 - DNA, 26 bp, synthetic construct
  misc_feature 1..26: note = Description of Artificial Sequence: Synthetic oligonucleotide for constructing gRNA expression plasmid
  source 1..26: mol_type = other DNA
aaaacacaagcagaagaacggcatcg

SEQ ID NO: 307 - DNA, 26 bp, synthetic construct
  misc_feature 1..26: note = Description of Artificial Sequence: Synthetic oligonucleotide for constructing gRNA expression plasmid
  source 1..26: mol_type = other DNA
aaaacacaagcagaagaacggcatcg

SEQ ID NO: 308 - DNA, 26 bp, synthetic construct
  misc_feature 1..26: note = Description of Artificial Sequence: Synthetic oligonucleotide for constructing gRNA expression plasmid
  source 1..26: mol_type = other DNA
aaaacacaagcagaagaacggcatcg

SEQ ID NO: 309 - DNA, 26 bp, synthetic construct
  misc_feature 1..26: note = Description of Artificial Sequence: Synthetic oligonucleotide for constructing gRNA expression plasmid
  source 1..26: mol_type = other DNA
aaaacacaagcagaagaacggcatcg

SEQ ID NO: 310 - DNA, 26 bp, synthetic construct
  misc_feature 1..26: note = Description of Artificial Sequence: Synthetic oligonucleotide for constructing gRNA expression plasmid
  source 1..26: mol_type = other DNA
aaaacacaagcagaagaacggcatcg

SEQ ID NO: 311 - DNA, 26 bp, synthetic construct
  misc_feature 1..26: note = Description of Artificial Sequence: Synthetic oligonucleotide for constructing gRNA expression plasmid
  source 1..26: mol_type = other DNA
aaaactgaagcagaagaacggcatcg

SEQ ID NO: 312 - DNA, 26 bp, synthetic construct
  misc_feature 1..26: note = Description of Artificial Sequence: Synthetic oligonucleotide for constructing gRNA expression plasmid
  source 1..26: mol_type = other DNA
aaaacacaagcagaagaacggcatcg

SEQ ID NO: 313 - DNA, 26 bp, synthetic construct
  misc_feature 1..26: note = Description of Artificial Sequence: Synthetic oligonucleotide for constructing gRNA expression plasmid
  source 1..26: mol_type = other DNA
aaaacacaagcagaagaacggcatcg

SEQ ID NO: 314 - DNA, 26 bp, synthetic construct
  misc_feature 1..26: note = Description of Artificial Sequence: Synthetic oligonucleotide for constructing gRNA expression plasmid
  source 1..26: mol_type = other DNA
aaaacacaagctcaagaacggcatcg

SEQ ID NO: 315 - DNA, 26 bp, synthetic construct
  misc_feature 1..26: note = Description of Artificial Sequence: Synthetic oligonucleotide for constructing gRNA expression plasmid
  source 1..26: mol_type = other DNA
aaaacacaagcagaagaacggcatcg

SEQ ID NO: 316 - DNA, 26 bp, synthetic construct
  misc_feature 1..26: note = Description of Artificial Sequence: Synthetic oligonucleotide for constructing gRNA expression plasmid
  source 1..26: mol_type = other DNA
aaaacacaagcagaagaacggcatcg

SEQ ID NO: 317 - DNA, 26 bp, synthetic construct
  misc_feature 1..26: note = Description of Artificial Sequence: Synthetic oligonucleotide for constructing gRNA expression plasmid
  source 1..26: mol_type = other DNA
aaaacacaagcagaagaacggcatcg

SEQ ID NO: 318 - DNA, 26 bp, synthetic construct
  misc_feature 1..26: note = Description of Artificial Sequence: Synthetic oligonucleotide for constructing gRNA expression plasmid
  source 1..26: mol_type = other DNA
aaaacacaagcagaagaacggcatcg

SEQ ID NO: 319 - DNA, 26 bp, synthetic construct
  misc_feature 1..26: note = Description of Artificial Sequence: Synthetic oligonucleotide for constructing gRNA expression plasmid
  source 1..26: mol_type = other DNA
aaaacacaagcagaagaacggcatcg

SEQ ID NO: 320 - DNA, 26 bp, synthetic construct
  misc_feature 1..26: note = Description of Artificial Sequence: Synthetic oligonucleotide for constructing gRNA expression plasmid
  source 1..26: mol_type = other DNA
aaaacacaagcagaagaacggcaagg

SEQ ID NO: 321 - DNA, 26 bp, synthetic construct
  misc_feature 1..26: note = Description of Artificial Sequence: Synthetic oligonucleotide for constructing gRNA expression plasmid
  source 1..26: mol_type = other DNA
aaaacacaagcagaagaacgggtacg

SEQ ID NO: 322 - DNA, 26 bp, synthetic construct
  misc_feature 1..26: note = Description of Artificial Sequence: Synthetic oligonucleotide for constructing gRNA expression plasmid
  source 1..26: mol_type = other DNA
aaaacacaagcagaagaacgcgtacg

SEQ ID NO: 323 - DNA, 26 bp, synthetic construct
  misc_feature 1..26: note = Description of Artificial Sequence: Synthetic oligonucleotide for constructing gRNA expression plasmid
  source 1..26: mol_type = other DNA
aaaacacaagcagaagaacccgtacg

SEQ ID NO: 324 - DNA, 26 bp, synthetic construct
  misc_feature 1..26: note = Description of Artificial Sequence: Synthetic oligonucleotide for constructing gRNA expression plasmid
  source 1..26: mol_type = other DNA
aaaacacaagcagaagaagccgtacg

SEQ ID NO: 325 - DNA, 26 bp, synthetic construct
  misc_feature 1..26: note = Description of Artificial Sequence: Synthetic oligonucleotide for constructing gRNA expression plasmid
  source 1..26: mol_type = other DNA
aaaacacaagcagaagatgccgtacg

SEQ ID NO: 326 - DNA, 26 bp, synthetic construct
  misc_feature 1..26: note = Description of Artificial Sequence: Synthetic oligonucleotide for constructing gRNA expression plasmid
  source 1..26: mol_type = other DNA
aaaacacaagcagaagttgccgtacg

SEQ ID NO: 327 - DNA, 26 bp, synthetic construct
  misc_feature 1..26: note = Description of Artificial Sequence: Synthetic oligonucleotide for constructing gRNA expression plasmid
  source 1..26: mol_type = other DNA
aaaacacaagcagaacttgccgtacg

SEQ ID NO: 328 - DNA, 26 bp, synthetic construct
  misc_feature 1..26: note = Description of Artificial Sequence: Synthetic oligonucleotide for constructing gRNA expression plasmid
  source 1..26: mol_type = other DNA
aaaactctagcagaagaacggcatcg

SEQ ID NO: 329 - DNA, 26 bp, synthetic construct
  misc_feature 1..26: note = Description of Artificial Sequence: Synthetic oligonucleotide for constructing gRNA expression plasmid
  source 1..26: mol_type = other DNA
aaaacactaccagaagaacggcatcg

SEQ ID NO: 330 - DNA, 26 bp, synthetic construct
  misc_feature 1..26: note = Description of Artificial Sequence: Synthetic oligonucleotide for constructing gRNA expression plasmid
  source 1..26: mol_type = other DNA
aaaacactagctgaagaacggcatcg

SEQ ID NO: 331 - DNA, 26 bp, synthetic construct
  misc_feature 1..26: note = Description of Artificial Sequence: Synthetic oligonucleotide for constructing gRNA expression plasmid
  source 1..26: mol_type = other DNA
aaaacactagcagtagaacggcatcg

SEQ ID NO: 332 - DNA, 26 bp, synthetic construct
  misc_feature 1..26: note = Description of Artificial Sequence: Synthetic oligonucleotide for constructing gRNA expression plasmid
  source 1..26: mol_type = other DNA
aaaacactagcagaacaacggcatcg

SEQ ID NO: 333 - DNA, 26 bp, synthetic construct
  misc_feature 1..26: note = Description of Artificial Sequence: Synthetic oligonucleotide for constructing gRNA expression plasmid
  source 1..26: mol_type = other DNA
aaaacactagcagaagatcggcatcg

SEQ ID NO: 334 - DNA, 26 bp, synthetic construct
  misc_feature 1..26: note = Description of Artificial Sequence: Synthetic oligonucleotide for constructing gRNA expression plasmid
  source 1..26: mol_type = other DNA
aaaacactagcagaagaaccgcatcg

SEQ ID NO: 335 - DNA, 26 bp, synthetic construct
  misc_feature 1..26: note = Description of Artificial Sequence: Synthetic oligonucleotide for constructing gRNA expression plasmid
  source 1..26: mol_type = other DNA
aaaacactagcagaagaacgggatcg

SEQ ID NO: 336 - DNA, 26 bp, synthetic construct
  misc_feature 1..26: note = Description of Artificial Sequence: Synthetic oligonucleotide for constructing gRNA expression plasmid
  source 1..26: mol_type = other DNA
aaaacactagcagaagaacggcaacg

SEQ ID NO: 337 - DNA, 26 bp, synthetic construct
  misc_feature 1..26: note = Description of Artificial Sequence: Synthetic oligonucleotide for constructing gRNA expression plasmid
  source 1..26: mol_type = other DNA
aaaactcaagcagaacaacggcatcg

SEQ ID NO: 338 - DNA, 26 bp, synthetic construct
  misc_feature 1..26: note = Description of Artificial Sequence: Synthetic oligonucleotide for constructing gRNA expression plasmid
  source 1..26: mol_type = other DNA
aaaacacaaccagaacaacggcatcg

SEQ ID NO: 339 - DNA, 26 bp, synthetic construct
  misc_feature 1..26: note = Description of Artificial Sequence: Synthetic oligonucleotide for constructing gRNA expression plasmid
  source 1..26: mol_type = other DNA
aaaacacaagctgaacaacggcatcg

SEQ ID NO: 340 - DNA, 26 bp, synthetic construct
  misc_feature 1..26: note = Description of Artificial Sequence: Synthetic oligonucleotide for constructing gRNA expression plasmid
  source 1..26: mol_type = other DNA
aaaacacaagcagtacaacggcatcg

SEQ ID NO: 341 - DNA, 26 bp, synthetic construct
  misc_feature 1..26: note = Description of Artificial Sequence: Synthetic oligonucleotide for constructing gRNA expression plasmid
  source 1..26: mol_type = other DNA
aaaacacaagcagaacatcggcatcg

SEQ ID NO: 342 - DNA, 26 bp, synthetic construct
  misc_feature 1..26: note = Description of Artificial Sequence: Synthetic oligonucleotide for constructing gRNA expression plasmid
  source 1..26: mol_type = other DNA
aaaacacaagcagaacaaccgcatcg

SEQ ID NO: 343 - DNA, 26 bp, synthetic construct
  misc_feature 1..26: note = Description of Artificial Sequence: Synthetic oligonucleotide for constructing gRNA expression plasmid
  source 1..26: mol_type = other DNA
aaaacacaagcagaacaacgggatcg

SEQ ID NO: 344 - DNA, 26 bp, synthetic construct
  misc_feature 1..26: note = Description of Artificial Sequence: Synthetic oligonucleotide for constructing gRNA expression plasmid
  source 1..26: mol_type = other DNA
aaaacacaagcagaacaacggcaacg

SEQ ID NO: 345 - DNA, 26 bp, synthetic construct
  misc_feature 1..26: note = Description of Artificial Sequence: Synthetic oligonucleotide for constructing gRNA expression plasmid
  source 1..26: mol_type = other DNA
aaaactcaagcagaagaacggcaacg

SEQ ID NO: 346 - DNA, 26 bp, synthetic construct
  misc_feature 1..26: note = Description of Artificial Sequence: Synthetic oligonucleotide for constructing gRNA expression plasmid
  source 1..26: mol_type = other DNA
aaaacacaaccagaagaacggcaacg

SEQ ID NO: 347 - DNA, 26 bp, synthetic construct
  misc_feature 1..26: note = Description of Artificial Sequence: Synthetic oligonucleotide for constructing gRNA expression plasmid
  source 1..26: mol_type = other DNA
aaaacacaagctgaagaacggcaacg

SEQ ID NO: 348 - DNA, 26 bp, synthetic construct
  misc_feature 1..26: note = Description of Artificial Sequence: Synthetic oligonucleotide for constructing gRNA expression plasmid
  source 1..26: mol_type = other DNA
aaaacacaagcagtagaacggcaacg

SEQ ID NO: 349 - DNA, 26 bp, synthetic construct
  misc_feature 1..26: note = Description of Artificial Sequence: Synthetic oligonucleotide for constructing gRNA expression plasmid
  source 1..26: mol_type = other DNA
aaaacacaagcagaagatcggcaacg

SEQ ID NO: 350 - DNA, 26 bp, synthetic construct
  misc_feature 1..26: note = Description of Artificial Sequence: Synthetic oligonucleotide for constructing gRNA expression plasmid
  source 1..26: mol_type = other DNA
aaaacacaagcagaagaaccgcaacg

SEQ ID NO: 351 - DNA, 26 bp, synthetic construct
  misc_feature 1..26: note = Description of Artificial Sequence: Synthetic oligonucleotide for constructing gRNA expression plasmid
  source 1..26: mol_type = other DNA
aaaacacaagcagaagaacgggaacg

SEQ ID NO: 352 - DNA, 26 bp, synthetic construct
  misc_feature 1..26: note = Description of Artificial Sequence: Synthetic oligonucleotide for constructing gRNA expression plasmid
  source 1..26: mol_type = other DNA
aaaactgaagttcatctgcaccaccg

SEQ ID NO: 353 - DNA, 26 bp, synthetic construct
  misc_feature 1..26: note = Description of Artificial Sequence: Synthetic oligonucleotide for constructing gRNA expression plasmid
  source 1..26: mol_type = other DNA
aaaacagaagttcatctgcaccaccg

SEQ ID NO: 354 - DNA, 26 bp, synthetic construct
  misc_feature 1..26: note = Description of Artificial Sequence: Synthetic oligonucleotide for constructing gRNA expression plasmid
  source 1..26: mol_type = other DNA
aaaactcaagttcatctgcaccaccg

SEQ ID NO: 355 - DNA, 26 bp, synthetic construct
  misc_feature 1..26: note = Description of Artificial Sequence: Synthetic oligonucleotide for constructing gRNA expression plasmid
  source 1..26: mol_type = other DNA
aaaactgtagttcatctgcaccaccg

SEQ ID NO: 356 - DNA, 26 bp, synthetic construct
  misc_feature 1..26: note = Description of Artificial Sequence: Synthetic oligonucleotide for constructing gRNA expression plasmid
  source 1..26: mol_type = other DNA
aaaactgatgttcatctgcaccaccg

SEQ ID NO: 357 - DNA, 26 bp, synthetic construct
  misc_feature 1..26: note = Description of Artificial Sequence: Synthetic oligonucleotide for constructing gRNA expression plasmid
  source 1..26: mol_type = other DNA
aaaactgaacttcatctgcaccaccg

SEQ ID NO: 358 - DNA, 26 bp, synthetic construct
  misc_feature 1..26: note = Description of Artificial Sequence: Synthetic oligonucleotide for constructing gRNA expression plasmid
  source 1..26: mol_type = other DNA
aaaactgaagatcatctgcaccaccg

SEQ ID NO: 359 - DNA, 26 bp, synthetic construct
  misc_feature 1..26: note = Description of Artificial Sequence: Synthetic oligonucleotide for constructing gRNA expression plasmid
  source 1..26: mol_type = other DNA
aaaactgaagtacatctgcaccaccg

SEQ ID NO: 360 - DNA, 26 bp, synthetic construct
  misc_feature 1..26: note = Description of Artificial Sequence: Synthetic oligonucleotide for constructing gRNA expression plasmid
  source 1..26: mol_type = other DNA
aaaactgaagttgatctgcaccaccg

SEQ ID NO: 361 - DNA, 26 bp, synthetic construct
  misc_feature 1..26: note = Description of Artificial Sequence: Synthetic oligonucleotide for constructing gRNA expression plasmid
  source 1..26: mol_type = other DNA
aaaactgaagttcttctgcaccaccg

SEQ ID NO: 362 - DNA, 26 bp, synthetic construct
  misc_feature 1..26: note = Description of Artificial Sequence: Synthetic oligonucleotide for constructing gRNA expression plasmid
  source 1..26: mol_type = other DNA
aaaactgaagttcaactgcaccaccg

SEQ ID NO: 363 - DNA, 26 bp, synthetic construct
  misc_feature 1..26: note = Description of Artificial Sequence: Synthetic oligonucleotide for constructing gRNA expression plasmid
  source 1..26: mol_type = other DNA
aaaactgaagttcatgtgcaccaccg

SEQ ID NO: 364 - DNA, 26 bp, synthetic construct
  misc_feature 1..26: note = Description of Artificial Sequence: Synthetic oligonucleotide for constructing gRNA expression plasmid
  source 1..26: mol_type = other DNA
aaaactgaagttcatcagcaccaccg

SEQ ID NO: 365 - DNA, 26 bp, synthetic construct
  misc_feature 1..26: note = Description of Artificial Sequence: Synthetic oligonucleotide for constructing gRNA expression plasmid
  source 1..26: mol_type = other DNA
aaaactgaagttcatctccaccaccg

SEQ ID NO: 366 - DNA, 26 bp, synthetic construct
  misc_feature 1..26: note = Description of Artificial Sequence: Synthetic oligonucleotide for constructing gRNA expression plasmid
  source 1..26: mol_type = other DNA
aaaactgaagttcatctggaccaccg

SEQ ID NO: 367 - DNA, 26 bp, synthetic construct
  misc_feature 1..26: note = Description of Artificial Sequence: Synthetic oligonucleotide for constructing gRNA expression plasmid
  source 1..26: mol_type = other DNA
aaaactgaagttcatctgctccaccg

SEQ ID NO: 368 - DNA, 26 bp, synthetic construct
  misc_feature 1..26: note = Description of Artificial Sequence: Synthetic oligonucleotide for constructing gRNA expression plasmid
  source 1..26: mol_type = other DNA
aaaactgaagttcatctgcagcaccg

SEQ ID NO: 369 - DNA, 26 bp, synthetic construct
  misc_feature 1..26: note = Description of Artificial Sequence: Synthetic oligonucleotide for constructing gRNA expression plasmid
  source 1..26: mol_type = other DNA
aaaactgaagttcatctgcacgaccg

SEQ ID NO: 370 - DNA, 26 bp, synthetic construct
  misc_feature 1..26: note = Description of Artificial Sequence: Synthetic oligonucleotide for constructing gRNA expression plasmid
  source 1..26: mol_type = other DNA
aaaactgaagttcatctgcacctccg

SEQ ID NO: 371 - DNA, 26 bp, synthetic construct
  misc_feature 1..26: note = Description of Artificial Sequence: Synthetic oligonucleotide for constructing gRNA expression plasmid
  source 1..26: mol_type = other DNA
aaaactgaagttcatctgcaccagcg

SEQ ID NO: 372 - DNA, 26 bp, synthetic construct
  misc_feature 1..26: note = Description of Artificial Sequence: Synthetic oligonucleotide for constructing gRNA expression plasmid
  source 1..26: mol_type = other DNA
aaaacacaagttcatctgcaccaccg

SEQ ID NO: 373 - DNA, 26 bp, synthetic construct
  misc_feature 1..26: note = Description of Artificial Sequence: Synthetic oligonucleotide for constructing gRNA expression plasmid
  source 1..26: mol_type = other DNA
aaaactgttgttcatctgcaccaccg

SEQ ID NO: 374 - DNA, 26 bp, synthetic construct
  misc_feature 1..26: note = Description of Artificial Sequence: Synthetic oligonucleotide for constructing gRNA expression plasmid
  source 1..26: mol_type = other DNA
aaaactgaacatcatctgcaccaccg

SEQ ID NO: 375 - DNA, 26 bp, synthetic construct
  misc_feature 1..26: note = Description of Artificial Sequence: Synthetic oligonucleotide for constructing gRNA expression plasmid
  source 1..26: mol_type = other DNA
aaaactgaagtagatctgcaccaccg

SEQ ID NO: 376 - DNA, 26 bp, synthetic construct
  misc_feature 1..26: note = Description of Artificial Sequence: Synthetic oligonucleotide for constructing gRNA expression plasmid
  source 1..26: mol_type = other DNA
aaaactgaagttctactgcaccaccg

SEQ ID NO: 377 - DNA, 26 bp, synthetic construct
  misc_feature 1..26: note = Description of Artificial Sequence: Synthetic oligonucleotide for constructing gRNA expression plasmid
  source 1..26: mol_type = other DNA
aaaactgaagttcatgagcaccaccg

SEQ ID NO: 378 - DNA, 26 bp, synthetic construct
  misc_feature 1..26: note = Description of Artificial Sequence: Synthetic oligonucleotide for constructing gRNA expression plasmid
  source 1..26: mol_type = other DNA
aaaactgaagttcatctcgaccaccg

SEQ ID NO: 379 - DNA, 26 bp, synthetic construct
  misc_feature 1..26: note = Description of Artificial Sequence: Synthetic oligonucleotide for constructing gRNA expression plasmid
  source 1..26: mol_type = other DNA
aaaactgaagttcatctgctgcaccg

SEQ ID NO: 380 - DNA, 26 bp, synthetic construct
  misc_feature 1..26: note = Description of Artificial Sequence: Synthetic oligonucleotide for constructing gRNA expression plasmid
  source 1..26: mol_type = other DNA
aaaactgaagttcatctgcacgtccg

SEQ ID NO: 381 - DNA, 26 bp, synthetic construct
  misc_feature 1..26: note = Description of Artificial Sequence: Synthetic oligonucleotide for constructing gRNA expression plasmid
  source 1..26: mol_type = other DNA
aaaactgaagttcatctgcaccaggg

SEQ ID NO: 382 - DNA, 26 bp, synthetic construct
  misc_feature 1..26: note = Description of Artificial Sequence: Synthetic oligonucleotide for constructing gRNA expression plasmid
  source 1..26: mol_type = other DNA
aaaactgaagttcatctgcacgtgcg

SEQ ID NO: 383 - DNA, 26 bp, synthetic construct
  misc_feature 1..26: note = Description of Artificial Sequence: Synthetic oligonucleotide for constructing gRNA expression plasmid
  source 1..26: mol_type = other DNA
aaaactgaagttcatctgcaggtgcg

SEQ ID NO: 384 - DNA, 26 bp, synthetic construct
  misc_feature 1..26: note = Description of Artificial Sequence: Synthetic oligonucleotide for constructing gRNA expression plasmid
  source 1..26: mol_type = other DNA
aaaactgaagttcatctgctggtgcg

SEQ ID NO: 385 - DNA, 26 bp, synthetic construct
  misc_feature 1..26: note = Description of Artificial Sequence: Synthetic oligonucleotide for constructing gRNA expression plasmid
  source 1..26: mol_type = other DNA
aaaactgaagttcatctggtggtgcg

SEQ ID NO: 386 - DNA, 26 bp, synthetic construct
  misc_feature 1..26: note = Description of Artificial Sequence: Synthetic oligonucleotide for constructing gRNA expression plasmid
  source 1..26: mol_type = other DNA
aaaactgaagttcatctcgtggtgcg

SEQ ID NO: 387 - DNA, 26 bp, synthetic construct
  misc_feature 1..26: note = Description of Artificial Sequence: Synthetic oligonucleotide for constructing gRNA expression plasmid
  source 1..26: mol_type = other DNA
aaaactgaagttcatcacgtggtgcg

SEQ ID NO: 388 - DNA, 26 bp, synthetic construct
  misc_feature 1..26: note = Description of Artificial Sequence: Synthetic oligonucleotide for constructing gRNA expression plasmid
  source 1..26: mol_type = other DNA
aaaactgaagttcatgacgtggtgcg

SEQ ID NO: 389 - DNA, 26 bp, synthetic construct
  misc_feature 1..26: note = Description of Artificial Sequence: Synthetic oligonucleotide for constructing gRNA expression plasmid
  source 1..26: mol_type = other DNA
aaaacagtagttcatctgcaccaccg

SEQ ID NO: 390 - DNA, 26 bp, synthetic construct
  misc_feature 1..26: note = Description of Artificial Sequence: Synthetic oligonucleotide for constructing gRNA expression plasmid
  source 1..26: mol_type = other DNA
aaaactgtacttcatctgcaccaccg

SEQ ID NO: 391 - DNA, 26 bp, synthetic construct
  misc_feature 1..26: note = Description of Artificial Sequence: Synthetic oligonucleotide for constructing gRNA expression plasmid
  source 1..26: mol_type = other DNA
aaaactgtagtacatctgcaccaccg

SEQ ID NO: 392 - DNA, 26 bp, synthetic construct
  misc_feature 1..26: note = Description of Artificial Sequence: Synthetic oligonucleotide for constructing gRNA expression plasmid
  source 1..26: mol_type = other DNA
aaaactgtagttcttctgcaccaccg

SEQ ID NO: 393 - DNA, 26 bp, synthetic construct
  misc_feature 1..26: note = Description of Artificial Sequence: Synthetic oligonucleotide for constructing gRNA expression plasmid
  source 1..26: mol_type = other DNA
aaaactgtagttcatgtgcaccaccg

SEQ ID NO: 394 - DNA, 26 bp, synthetic construct
  misc_feature 1..26: note = Description of Artificial Sequence: Synthetic oligonucleotide for constructing gRNA expression plasmid
  source 1..26: mol_type = other DNA
aaaactgtagttcatctccaccaccg

SEQ ID NO: 395 - DNA, 26 bp, synthetic construct
  misc_feature 1..26: note = Description of Artificial Sequence: Synthetic oligonucleotide for constructing gRNA expression plasmid
  source 1..26: mol_type = other DNA
aaaactgtagttcatctgctccaccg

SEQ ID NO: 396 - DNA, 26 bp, synthetic construct
  misc_feature 1..26: note = Description of Artificial Sequence: Synthetic oligonucleotide for constructing gRNA expression plasmid
  source 1..26: mol_type = other DNA
aaaactgtagttcatctgcacgaccg

SEQ ID NO: 397 - DNA, 26 bp, synthetic construct
  misc_feature 1..26: note = Description of Artificial Sequence: Synthetic oligonucleotide for constructing gRNA expression plasmid
  source 1..26: mol_type = other DNA
aaaactgtagttcatctgcaccagcg

SEQ ID NO: 398 - DNA, 26 bp, synthetic construct
  misc_feature 1..26: note = Description of Artificial Sequence: Synthetic oligonucleotide for constructing gRNA expression plasmid
  source 1..26: mol_type = other DNA
aaaacagaagttcatgtgcaccaccg

SEQ ID NO: 399 - DNA, 26 bp, synthetic construct
  misc_feature 1..26: note = Description of Artificial Sequence: Synthetic oligonucleotide for constructing gRNA expression plasmid
  source 1..26: mol_type = other DNA
aaaactgaacttcatgtgcaccaccg

SEQ ID NO: 400 - DNA, 26 bp, synthetic construct
  misc_feature 1..26: note = Description of Artificial Sequence: Synthetic oligonucleotide for constructing gRNA expression plasmid
  source 1..26: mol_type = other DNA
aaaactgaagtacatgtgcaccaccg

SEQ ID NO: 401 - DNA, 26 bp, synthetic construct
  misc_feature 1..26: note = Description of Artificial Sequence: Synthetic oligonucleotide for constructing gRNA expression plasmid
  source 1..26: mol_type = other DNA
aaaactgaagttcttgtgcaccaccg

SEQ ID NO: 402 - DNA, 26 bp, synthetic construct
  misc_feature 1..26: note = Description of Artificial Sequence: Synthetic oligonucleotide for constructing gRNA expression plasmid
  source 1..26: mol_type = other DNA
aaaactgaagttcatgtccaccaccg

SEQ ID NO: 403 - DNA, 26 bp, synthetic construct
  misc_feature 1..26: note = Description of Artificial Sequence: Synthetic oligonucleotide for constructing gRNA expression plasmid
  source 1..26: mol_type = other DNA
aaaactgaagttcatgtgctccaccg

SEQ ID NO: 404 - DNA, 26 bp, synthetic construct
  misc_feature 1..26: note = Description of Artificial Sequence: Synthetic oligonucleotide for constructing gRNA expression plasmid
  source 1..26: mol_type = other DNA
aaaactgaagttcatgtgcacgaccg

SEQ ID NO: 405 - DNA, 26 bp, synthetic construct
  misc_feature 1..26: note = Description of Artificial Sequence: Synthetic oligonucleotide for constructing gRNA expression plasmid
  source 1..26: mol_type = other DNA
aaaactgaagttcatgtgcaccagcg

SEQ ID NO: 406 - DNA, 26 bp, synthetic construct
  misc_feature 1..26: note = Description of Artificial Sequence: Synthetic oligonucleotide for constructing gRNA expression plasmid
  source 1..26: mol_type = other DNA
aaaacagaagttcatctgcaccagcg

SEQ ID NO: 407 - DNA, 26 bp, synthetic construct
  misc_feature 1..26: note = Description of Artificial Sequence: Synthetic oligonucleotide for constructing gRNA expression plasmid
  source 1..26: mol_type = other DNA
aaaactgaacttcatctgcaccagcg

SEQ ID NO: 408 - DNA, 26 bp, synthetic construct
  misc_feature 1..26: note = Description of Artificial Sequence: Synthetic oligonucleotide for constructing gRNA expression plasmid
  source 1..26: mol_type = other DNA
aaaactgaagtacatctgcaccagcg

SEQ ID NO: 409 - DNA, 26 bp, synthetic construct
  misc_feature 1..26: note = Description of Artificial Sequence: Synthetic oligonucleotide for constructing gRNA expression plasmid
  source 1..26: mol_type = other DNA
aaaactgaagttcttctgcaccagcg

SEQ ID NO: 410 - DNA, 26 bp, synthetic construct
  misc_feature 1..26: note = Description of Artificial Sequence: Synthetic oligonucleotide for constructing gRNA expression plasmid
  source 1..26: mol_type = other DNA
aaaactgaagttcatctccaccagcg

SEQ ID NO: 411 - DNA, 26 bp, synthetic construct
  misc_feature 1..26: note = Description of Artificial Sequence: Synthetic oligonucleotide for constructing gRNA expression plasmid
  source 1..26: mol_type = other DNA
aaaactgaagttcatctgctccagcg

SEQ ID NO: 412 - DNA, 26 bp, synthetic construct
  misc_feature 1..26: note = Description of Artificial Sequence: Synthetic oligonucleotide for constructing gRNA expression plasmid
  source 1..26: mol_type = other DNA
aaaactgaagttcatctgcacgagcg

SEQ ID NO: 413 - DNA, 26 bp, synthetic construct
  misc_feature 1..26: note = Description of Artificial Sequence: Synthetic oligonucleotide for constructing gRNA expression plasmid
  source 1..26: mol_type = other DNA
aaaacggagcaaactccccccacccg

SEQ ID NO: 414 - skipped

SEQ ID NO: 415 - DNA, 26 bp, synthetic construct
  misc_feature 1..26: note = Description of Artificial Sequence: Synthetic oligonucleotide for constructing gRNA expression plasmid
  source 1..26: mol_type = other DNA
aaaacgaggcggggtggagggggtcg

SEQ ID NO: 416 - skipped

SEQ ID NO: 417 - DNA, 26 bp, synthetic construct
  misc_feature 1..26: note = Description of Artificial Sequence: Synthetic oligonucleotide for constructing gRNA expression plasmid
  source 1..26: mol_type = other DNA
aaaaccacgcacacactcactcaccg

SEQ ID NO: 418 - skipped

SEQ ID NO: 419 - DNA, 26 bp, synthetic construct
  misc_feature 1..26: note = Description of Artificial Sequence: Synthetic oligonucleotide for constructing gRNA expression plasmid
  source 1..26: mol_type = other DNA
aaaacttcttcttctgctcggactcg

SEQ ID NO: 420 - skipped

SEQ ID NO: 421 - DNA, 26 bp, synthetic construct
  misc_feature 1..26: note = Description of Artificial Sequence: Synthetic oligonucleotide for constructing gRNA expression plasmid
  source 1..26: mol_type = other DNA
aaaaccaggtaatgactaagatgacg

SEQ ID NO: 422 - skipped

SEQ ID NO: 423 - DNA, 26 bp, synthetic construct
  misc_feature 1..26: note = Description of Artificial Sequence: Synthetic oligonucleotide for constructing gRNA expression plasmid
  source 1..26: mol_type = other DNA
aaaacggtgctgcagaagggattccg

SEQ ID NO: 424 - DNA, 23 bp, synthetic construct
  misc_feature 1..23: note = Description of Artificial Sequence: Synthetic target site sequence
  source 1..23: mol_type = other DNA
gggtgattgaagtttgctscagg

SEQ ID NO: 425 - DNA, 23 bp, synthetic construct
  misc_feature 1..23: note = Description of Artificial Sequence: Synthetic target site sequence
  source 1..23: mol_type = other DNA
ctctccccccaccccccctctgg

SEQ ID NO: 426 - DNA, 22 bp, synthetic construct
  misc_feature 1..22: note = Description of Artificial Sequence: Synthetic target site sequence
  source 1..22: mol_type = other DNA
atttcctcccccccccctcagg

SEQ ID NO: 427 - DNA, 23 bp, synthetic construct
  misc_feature 1..23: note = Description of Artificial Sequence: Synthetic target site sequence
  source 1..23: mol_type = other DNA
aagacagaggagaagaagaaggg

SEQ ID NO: 428 - DNA, 23 bp, synthetic construct
  misc_feature 1..23: note = Description of Artificial Sequence: Synthetic target site sequence
  source 1..23: mol_type = other DNA
tcattgyagcagaagaagaaagg

SEQ ID NO: 429 - DNA, 23 bp, synthetic construct
  misc_feature 1..23: note = Description of Artificial Sequence: Synthetic target site sequence
  source 1..23: mol_type = other DNA
ggtatctaagtcawtacctgtgg

SEQ ID NO: 430 - DNA, 46 bp, synthetic construct
  misc_feature 1..46: note = Description of Artificial Sequence: Synthetic target site sequence
  source 1..46: mol_type = other DNA
tccatctcactcattacctgaggtccatctcactcattacctgatg

SEQ ID NO: 431 - DNA, 23 bp, synthetic construct
  misc_feature 1..23: note = Description of Artificial Sequence: Synthetic target site sequence
  source 1..23: mol_type = other DNA
tttatattagtgattacctgcgg

SEQ ID NO: 432 - DNA, 23 bp, synthetic construct
  misc_feature 1..23: note = Description of Artificial Sequence: Synthetic target site sequence
  source 1..23: mol_type = other DNA
ggaatcccctctccagccyctgg

SEQ ID NO: 433 - DNA, 23 bp, synthetic construct
  misc_feature 1..23: note = Description of Artificial Sequence: Synthetic target site sequence
  source 1..23: mol_type = other DNA
ggaatctcttccttggcatctgg

SEQ ID NO: 434 - DNA, 23 bp, synthetic construct
  misc_feature 1..23: note = Description of Artificial Sequence: Synthetic target site sequence
  source 1..23: mol_type = other DNA
cagattactgctgcagcaccggg

SEQ ID NO: 435 - DNA, 23 bp, synthetic construct
  misc_feature 1..23: note = Description of Artificial Sequence: Synthetic target site sequence
  source 1..23: mol_type = other DNA
acacaaacttctgcagcacstgg

SEQ ID NO: 436 - DNA, 20 bp, synthetic construct
  misc_feature 1..20: note = Description of Artificial Sequence: Synthetic PCR primer
  source 1..20: mol_type = other DNA
tccagatggcacattgtcag

SEQ ID NO: 437 - DNA, 20 bp, synthetic construct
  misc_feature 1..20: note = Description of Artificial Sequence: Synthetic PCR primer
  source 1..20: mol_type = other DNA
ggggcccactcttcttccat

SEQ ID NO: 438 - DNA, 22 bp, synthetic construct
  misc_feature 1..22: note = Description of Artificial Sequence: Synthetic PCR primer
  source 1..22: mol_type = other DNA
gctaagcagagatgcctatgcc

SEQ ID NO: 439 - DNA, 20 bp, synthetic construct
  misc_feature 1..20: note = Description of Artificial Sequence: Synthetic PCR primer
  source 1..20: mol_type = other DNA
accccacagccaggttttca

SEQ ID NO: 440 - DNA, 20 bp, synthetic construct
  misc_feature 1..20: note = Description of Artificial Sequence: Synthetic PCR primer
  source 1..20: mol_type = other DNA
tgcggcaacttcagacaacc

SEQ ID NO: 441 - DNA, 20 bp, synthetic construct
  misc_feature 1..20: note = Description of Artificial Sequence: Synthetic PCR primer
  source 1..20: mol_type = other DNA
gcatgtcaggatctgacccc

SEQ ID NO: 442 - DNA, 20 bp, synthetic construct
  misc_feature 1..20: note = Description of Artificial Sequence: Synthetic PCR primer
  source 1..20: mol_type = other DNA
ccaccacatgttctgggtgc

SEQ ID NO: 443 - DNA, 20 bp, synthetic construct
  misc_feature 1..20: note = Description of Artificial Sequence: Synthetic PCR primer
  source 1..20: mol_type = other DNA
ggctctccctgccctagttt

SEQ ID NO: 444 - DNA, 24 bp, synthetic construct
  misc_feature 1..24: note = Description of Artificial Sequence: Synthetic PCR primer
  source 1..24: mol_type = other DNA
ggggctgagaacacatgagatgca

SEQ ID NO: 445 - DNA, 20 bp, synthetic construct
  misc_feature 1..20: note = Description of Artificial Sequence: Synthetic PCR primer
  source 1..20: mol_type = other DNA
cccgacctccgctccaaagc

SEQ ID NO: 446 - DNA, 20 bp, synthetic construct
  misc_feature 1..20: note = Description of Artificial Sequence: Synthetic PCR primer
  source 1..20: mol_type = other DNA
tgcaaggtcgcatagtccca

SEQ ID NO: 447 - DNA, 21 bp, synthetic construct
  misc_feature 1..21: note = Description of Artificial Sequence: Synthetic PCR primer
  source 1..21: mol_type = other DNA
gcccattctttttgcagtgga

SEQ ID NO: 448 - DNA, 20 bp, synthetic construct
  misc_feature 1..20: note = Description of Artificial Sequence: Synthetic PCR primer
  source 1..20: mol_type = other DNA
gcccccagcccctctgtttc

SEQ ID NO: 449 - DNA, 20 bp, synthetic construct
  misc_feature 1..20: note = Description of Artificial Sequence: Synthetic PCR primer
  source 1..20: mol_type = other DNA
cggctgccttccctgagtcc

SEQ ID NO: 450 - DNA, 26 bp, synthetic construct
  misc_feature 1..26: note = Description of Artificial Sequence: Synthetic PCR primer
  source 1..26: mol_type = other DNA
tgaccctggagtacaaaatgttccca

SEQ ID NO: 451 - DNA, 20 bp, synthetic construct
  misc_feature 1..20: note = Description of Artificial Sequence: Synthetic PCR primer
  source 1..20: mol_type = other DNA
tgcctccacccttagcccct

SEQ ID NO: 452 - DNA, 22 bp, synthetic construct
  misc_feature 1..22: note = Description of Artificial Sequence: Synthetic PCR primer
  source 1..22: mol_type = other DNA
aactcaggacaacactgcctgt

SEQ ID NO: 453 - DNA, 20 bp, synthetic construct
  misc_feature 1..20: note = Description of Artificial Sequence: Synthetic PCR primer
  source 1..20: mol_type = other DNA
tcctccttggagaggggccc

SEQ ID NO: 454 - DNA, 20 bp, synthetic construct
  misc_feature 1..20: note = Description of Artificial Sequence: Synthetic PCR primer
  source 1..20: mol_type = other DNA
ccgagggcatgggcaatcct

SEQ ID NO: 455 - DNA, 23 bp, synthetic construct
  misc_feature 1..23: note = Description of Artificial Sequence: Synthetic PCR primer
  source 1..23: mol_type = other DNA
tgctttgcatggggtctcagaca

SEQ ID NO: 456 - DNA, 27 bp, synthetic construct
  misc_feature 1..27: note = Description of Artificial Sequence: Synthetic PCR primer
  source 1..27: mol_type = other DNA
agctccttctcatttctcttctgctgt

SEQ ID NO: 457 - DNA, 23 bp, synthetic construct
  misc_feature 1..23: note = Description of Artificial Sequence: Synthetic PCR primer
  source 1..23: mol_type = other DNA
agcagacacaggtgaatgctgct

SEQ ID NO: 458 - DNA, 20 bp, synthetic construct
  misc_feature 1..20: note = Description of Artificial Sequence: Synthetic PCR primer
  source 1..20: mol_type = other DNA
cctgtggggctctcaggtgc

SEQ ID NO: 459 - DNA, 20 bp, synthetic construct
  misc_feature 1..20: note = Description of Artificial Sequence: Synthetic PCR primer
  source 1..20: mol_type = other DNA
agctgcactggggaatgagt

SEQ ID NO: 460 - DNA, 20 bp, synthetic construct
  misc_feature 1..20: note = Description of Artificial Sequence: Synthetic PCR primer
  source 1..20: mol_type = other DNA
ccagcctgggcaacaaagcg

SEQ ID NO: 461 - DNA, 20 bp, synthetic construct
  misc_feature 1..20: note = Description of Artificial Sequence: Synthetic PCR primer
  source 1..20: mol_type = other DNA
tacccccactgccccattgc

SEQ ID NO: 462 - DNA, 21 bp, synthetic construct
  misc_feature 1..21: note = Description of Artificial Sequence: Synthetic PCR primer
  source 1..21: mol_type = other DNA
acggattcacgacggaggtgc

SEQ ID NO: 463 - DNA, 23 bp, synthetic construct
  misc_feature 1..23: note = Description of Artificial Sequence: Synthetic PCR primer
  source 1..23: mol_type = other DNA
tgtggttgaagtaggggacaggt

SEQ ID NO: 464 - DNA, 23 bp, synthetic construct
  misc_feature 1..23: note = Description of Artificial Sequence: Synthetic PCR primer
  source 1..23: mol_type = other DNA
tgggatggcagagtcatcaacgt

SEQ ID NO: 465 - DNA, 20 bp, synthetic construct
  misc_feature 1..20: note = Description of Artificial Sequence: Synthetic PCR primer
  source 1..20: mol_type = other DNA
atggggcgctccagtctgtg

SEQ ID NO: 466 - DNA, 20 bp, synthetic construct
  misc_feature 1..20: note = Description of Artificial Sequence: Synthetic PCR primer
  source 1..20: mol_type = other DNA
ggggagggaggaccagggaa

SEQ ID NO: 467 - DNA, 20 bp, synthetic construct
  misc_feature 1..20: note = Description of Artificial Sequence: Synthetic PCR primer
  source 1..20: mol_type = other DNA
atcccgtgcaggaagtcgcc

SEQ ID NO: 468 - DNA, 20 bp, synthetic construct
  misc_feature 1..20: note = Description of Artificial Sequence: Synthetic PCR primer
  source 1..20: mol_type = other DNA
ccccaaccctttgctcagcg

SEQ ID NO: 469 - DNA, 20 bp, synthetic construct
  misc_feature 1..20: note = Description of Artificial Sequence: Synthetic PCR primer
  source 1..20: mol_type = other DNA
atcgacgaggagggggcctt

SEQ ID NO: 470 - DNA, 20 bp, synthetic construct
  misc_feature 1..20: note = Description of Artificial Sequence: Synthetic PCR primer
  source 1..20: mol_type = other DNA
tgctcaaggggcctgttcca

SEQ ID NO: 471 - DNA, 20 bp, synthetic construct
  misc_feature 1..20: note = Description of Artificial Sequence: Synthetic PCR primer
  source 1..20: mol_type = other DNA
tgcctggcacgcagtaggtg

SEQ ID NO: 472 - DNA, 20 bp, synthetic construct
  misc_feature 1..20: note = Description of Artificial Sequence: Synthetic PCR primer
  source 1..20: mol_type = other DNA
acctgggcttgccactaggg

SEQ ID NO: 473 - DNA, 20 bp, synthetic construct
  misc_feature 1..20: note = Description of Artificial Sequence: Synthetic PCR primer
  source 1..20: mol_type = other DNA
gtggccgggctactgctacc

SEQ ID NO: 474 - DNA, 20 bp, synthetic construct
  misc_feature 1..20: note = Description of Artificial Sequence: Synthetic PCR primer
  source 1..20: mol_type = other DNA
gcaagaggcggaggagaccc

SEQ ID NO: 475 - DNA, 23 bp, synthetic construct
  misc_feature 1..23: note = Description of Artificial Sequence: Synthetic PCR primer
  source 1..23: mol_type = other DNA
ggggtcagtggtgatatccccct

SEQ ID NO: 476 - DNA, 20 bp, synthetic construct
  misc_feature 1..20: note = Description of Artificial Sequence: Synthetic PCR primer
  source 1..20: mol_type = other DNA
agagaggccacgtggagggt

SEQ ID NO: 477 - DNA, 20 bp, synthetic construct
  misc_feature 1..20: note = Description of Artificial Sequence: Synthetic PCR primer
  source 1..20: mol_type = other DNA
gacagtgccttgcgatgcac

SEQ ID NO: 478 - DNA, 20 bp, synthetic construct
  misc_feature 1..20: note = Description of Artificial Sequence: Synthetic PCR primer
  source 1..20: mol_type = other DNA
tgtgtgaacgcagcctggct

SEQ ID NO: 479 - DNA, 22 bp, synthetic construct
  misc_feature 1..22: note = Description of Artificial Sequence: Synthetic PCR primer
  source 1..22: mol_type = other DNA
ggttctcccttggctcctgtga

SEQ ID NO: 480 - DNA, 27 bp, synthetic construct
  misc_feature 1..27: note = Description of Artificial Sequence: Synthetic PCR primer
  source 1..27: mol_type = other DNA
tgaagtcaacaatctaagcttccacct

SEQ ID NO: 481 - DNA, 24 bp, synthetic construct
  misc_feature 1..24: note = Description of Artificial Sequence: Synthetic PCR primer
  source 1..24: mol_type = other DNA
tgattgggctgcagttcatgtaca

SEQ ID NO: 482 - DNA, 21 bp, synthetic construct
  misc_feature 1..21: note = Description of Artificial Sequence: Synthetic PCR primer
  source 1..21: mol_type = other DNA
tccatgggcccctctgaaaga

SEQ ID NO: 483 - DNA, 20 bp, synthetic construct
  misc_feature 1..20: note = Description of Artificial Sequence: Synthetic PCR primer
  source 1..20: mol_type = other DNA
gcggttggtggggttgatgc

SEQ ID NO: 484 - DNA, 25 bp, synthetic construct
  misc_feature 1..25: note = Description of Artificial Sequence: Synthetic PCR primer
  source 1..25: mol_type = other DNA
aggcaagattttccagtgtgcaaga

SEQ ID NO: 485 - DNA, 20 bp, synthetic construct
  misc_feature 1..20: note = Description of Artificial Sequence: Synthetic PCR primer
  source 1..20: mol_type = other DNA
gctgctggtcgggctctctg

SEQ ID NO: 486 - DNA, 20 bp, synthetic construct
  misc_feature 1..20: note = Description of Artificial Sequence: Synthetic PCR primer
  source 1..20: mol_type = other DNA
gctgcgaggcttccgtgaga

SEQ ID NO: 487 - DNA, 20 bp, synthetic construct
  misc_feature 1..20: note = Description of Artificial Sequence: Synthetic PCR primer
  source 1..20: mol_type = other DNA
ccaggagcctgagagctgcc

SEQ ID NO: 488 - DNA, 20 bp, synthetic construct
  misc_feature 1..20: note = Description of Artificial Sequence: Synthetic PCR primer
  source 1..20: mol_type = other DNA
ctgtgctcagcctgggtgct

SEQ ID NO: 489 - DNA, 20 bp, synthetic construct
  misc_feature 1..20: note = Description of Artificial Sequence: Synthetic PCR primer
  source 1..20: mol_type = other DNA
agctcgcgccagatctgtgg

SEQ ID NO: 490 - DNA, 22 bp, synthetic construct
  misc_feature 1..22: note = Description of Artificial Sequence: Synthetic PCR primer
  source 1..22: mol_type = other DNA
agagaagtcgaggaagagagag

SEQ ID NO: 491 - DNA, 22 bp, synthetic construct
  misc_feature 1..22: note = Description of Artificial Sequence: Synthetic PCR primer
  source 1..22: mol_type = other DNA
tggacagctgcagtactccctg

SEQ ID NO: 492 - DNA, 20 bp, synthetic construct
  misc_feature 1..20: note = Description of Artificial Sequence: Synthetic PCR primer
  source 1..20: mol_type = other DNA
caagatgtgcacttgggcta

SEQ ID NO: 493 - DNA, 20 bp, synthetic construct
  misc_feature 1..20: note = Description of Artificial Sequence: Synthetic PCR primer
  source 1..20: mol_type = other DNA
gtccagtgcctgaccctggc

SEQ ID NO: 494 - DNA, 20 bp, synthetic construct
  misc_feature 1..20: note = Description of Artificial Sequence: Synthetic PCR primer
  source 1..20: mol_type = other DNA
gctcccgatcctctgccacc

SEQ ID NO: 495 - DNA, 20 bp, synthetic construct
  misc_feature 1..20: note = Description of Artificial Sequence: Synthetic PCR primer
  source 1..20: mol_type = other DNA
ggggacaggcaggcaaggag

SEQ ID NO: 496 - DNA, 20 bp, synthetic construct
  misc_feature 1..20: note = Description of Artificial Sequence: Synthetic PCR primer
  source 1..20: mol_type = other DNA
aaggggctgctgggtaggac

SEQ ID NO: 497 - DNA, 20 bp, synthetic construct
  misc_feature 1..20: note = Description of Artificial Sequence: Synthetic PCR primer
  source 1..20: mol_type = other DNA
gaccctcaggaagctgggag

SEQ ID NO: 498 - DNA, 18 bp, synthetic construct
  misc_feature 1..18: note = Description of Artificial Sequence: Synthetic PCR primer
  source 1..18: mol_type = other DNA
ccgcggcgctctgctaga

SEQ ID NO: 499 - DNA, 20 bp, synthetic construct
  misc_feature 1..20: note = Description of Artificial Sequence: Synthetic PCR primer
  source 1..20: mol_type = other DNA
ccaggtggtgtcagcggagg

SEQ ID NO: 500 - DNA, 20 bp, synthetic construct
  misc_feature 1..20: note = Description of Artificial Sequence: Synthetic PCR primer
  source 1..20: mol_type = other DNA
cgactccacggcgtctcagg

SEQ ID NO: 501 - DNA, 20 bp, synthetic construct
  misc_feature 1..20: note = Description of Artificial Sequence: Synthetic PCR primer
  source 1..20: mol_type = other DNA
cttccctcccccagcaccac

SEQ ID NO: 502 - DNA, 20 bp, synthetic construct
  misc_feature 1..20: note = Description of Artificial Sequence: Synthetic PCR primer
  source 1..20: mol_type = other DNA
ccccggggagtctgtcctga

SEQ ID NO: 503 - DNA, 20 bp, synthetic construct
  misc_feature 1..20: note = Description of Artificial Sequence: Synthetic PCR primer
  source 1..20: mol_type = other DNA
gaagcgcgaaaacccggctc

SEQ ID NO: 504 - DNA, 20 bp, synthetic construct
  misc_feature 1..20: note = Description of Artificial Sequence: Synthetic PCR primer
  source 1..20: mol_type = other DNA
agggtggtcagggaggcctt

SEQ ID NO: 505 - DNA, 20 bp, synthetic construct
  misc_feature 1..20: note = Description of Artificial Sequence: Synthetic PCR primer
  source 1..20: mol_type = other DNA
gggaagaggcagggctgtcg

SEQ ID NO: 506 - DNA, 20 bp, synthetic construct
  misc_feature 1..20: note = Description of Artificial Sequence: Synthetic PCR primer
  source 1..20: mol_type = other DNA
gagtgacgatgagccccggg

SEQ ID NO: 507 - DNA, 20 bp, synthetic construct
  misc_feature 1..20: note = Description of Artificial Sequence: Synthetic PCR primer
  source 1..20: mol_type = other DNA
cccatgaggggtttgagtgc

SEQ ID NO: 508 - DNA, 20 bp, synthetic construct
  misc_feature 1..20: note = Description of Artificial Sequence: Synthetic PCR primer
  source 1..20: mol_type = other DNA
cacctggggcatctgggtgg

SEQ ID NO: 509 - DNA, 20 bp, synthetic construct
  misc_feature 1..20: note = Description of Artificial Sequence: Synthetic PCR primer
  source 1..20: mol_type = other DNA
tcatgatccccaaaagggct

SEQ ID NO: 510 - DNA, 21 bp, synthetic construct
  misc_feature 1..21: note = Description of Artificial Sequence: Synthetic PCR primer
  source 1..21: mol_type = other DNA
tggtgcccagaatagtggcca

SEQ ID NO: 511 - DNA, 20 bp, synthetic construct
  misc_feature 1..20: note = Description of Artificial Sequence: Synthetic PCR primer
  source 1..20: mol_type = other DNA
gcctcagacaaccctgcccc

SEQ ID NO: 512 - DNA, 22 bp, synthetic construct
  misc_feature 1..22: note = Description of Artificial Sequence: Synthetic PCR primer
  source 1..22: mol_type = other DNA
gccgggacaagactgagttggg

SEQ ID NO: 513 - DNA, 20 bp, synthetic construct
  misc_feature 1..20: note = Description of Artificial Sequence: Synthetic PCR primer
  source 1..20: mol_type = other DNA
tgctgcaggtggttccggag

SEQ ID NO: 514 - DNA, 21 bp, synthetic construct
  misc_feature 1..21: note = Description of Artificial Sequence: Synthetic PCR primer
  source 1..21: mol_type = other DNA
acactggtccaggtcccgtct

SEQ ID NO: 515 - DNA, 20 bp, synthetic construct
  misc_feature 1..20: note = Description of Artificial Sequence: Synthetic PCR primer
  source 1..20: mol_type = other DNA
atcgcgcccaaagcacaggt

SEQ ID NO: 516 - DNA, 22 bp, synthetic construct
  misc_feature 1..22: note = Description of Artificial Sequence: Synthetic PCR primer
  source 1..22: mol_type = other DNA
ccctcatggtggtcttacggca

SEQ ID NO: 517 - DNA, 20 bp, synthetic construct
  misc_feature 1..20: note = Description of Artificial Sequence: Synthetic PCR primer
  source 1..20: mol_type = other DNA
tgcgtcgctcatgctgggag

SEQ ID NO: 518 - DNA, 20 bp, synthetic construct
  misc_feature 1..20: note = Description of Artificial Sequence: Synthetic PCR primer
  source 1..20: mol_type = other DNA
gagctgagacggcaccactg

SEQ ID NO: 519 - DNA, 20 bp, synthetic construct
  misc_feature 1..20: note = Description of Artificial Sequence: Synthetic PCR primer
  source 1..20: mol_type = other DNA
agtgagagtggcacgaacca

SEQ ID NO: 520 - DNA, 20 bp, synthetic construct
  misc_feature 1..20: note = Description of Artificial Sequence: Synthetic PCR primer
  source 1..20: mol_type = other DNA
gggagaaccttgtccagcct

SEQ ID NO: 521 - DNA, 20 bp, synthetic construct
  misc_feature 1..20: note = Description of Artificial Sequence: Synthetic PCR primer
  source 1..20: mol_type = other DNA
cttcccagtgtggcccgtcc

SEQ ID NO: 522 - DNA, 20 bp, synthetic construct
  misc_feature 1..20: note = Description of Artificial Sequence: Synthetic PCR primer
  source 1..20: mol_type = other DNA
ctgagagggggagggggagg

SEQ ID NO: 523 - DNA, 20 bp, synthetic construct
  misc_feature 1..20: note = Description of Artificial Sequence: Synthetic PCR primer
  source 1..20: mol_type = other DNA
cagcctgctgcatcggaaaa

SEQ ID NO: 524 - DNA, 20 bp, synthetic construct
  misc_feature 1..20: note = Description of Artificial Sequence: Synthetic PCR primer
  source 1..20: mol_type = other DNA
tccctctgacccggaaccca

SEQ ID NO: 525 - DNA, 20 bp, synthetic construct
  misc_feature 1..20: note = Description of Artificial Sequence: Synthetic PCR primer
  source 1..20: mol_type = other DNA
tgggggttgcgtgcttgtca

SEQ ID NO: 526 - DNA, 20 bp, synthetic construct
  misc_feature 1..20: note = Description of Artificial Sequence: Synthetic PCR primer
  source 1..20: mol_type = other DNA
atcaggtgccaggaggacac

SEQ ID NO: 527 - DNA, 24 bp, synthetic construct
  misc_feature 1..24: note = Description of Artificial Sequence: Synthetic PCR primer
  source 1..24: mol_type = other DNA
tgagccacatgaatcaaggcctcc

SEQ ID NO: 528 - DNA, 20 bp, synthetic construct
  misc_feature 1..20: note = Description of Artificial Sequence: Synthetic PCR primer
  source 1..20: mol_type = other DNA
ggtccctctgtgcagtggaa

SEQ ID NO: 529 - DNA, 20 bp, synthetic construct
  misc_feature 1..20: note = Description of Artificial Sequence: Synthetic PCR primer
  source 1..20: mol_type = other DNA
gcgaggctgctgacttccct

SEQ ID NO: 530 - DNA, 20 bp, synthetic construct
  misc_feature 1..20: note = Description of Artificial Sequence: Synthetic PCR primer
  source 1..20: mol_type = other DNA
attgcaggcgtgtccaggca

SEQ ID NO: 531 - DNA, 27 bp, synthetic construct
  misc_feature 1..27: note = Description of Artificial Sequence: Synthetic PCR primer
  source 1..27: mol_type = other DNA
tgctctgccatttatgtcctatgaact

SEQ ID NO: 532 - DNA, 20 bp, synthetic construct
  misc_feature 1..20: note = Description of Artificial Sequence: Synthetic PCR primer
  source 1..20: mol_type = other DNA
tccgcccaaacaggaggcag

SEQ ID NO: 533 - DNA, 20 bp, synthetic construct
  misc_feature 1..20: note = Description of Artificial Sequence: Synthetic PCR primer
  source 1..20: mol_type = other DNA
gggggtctggctcacctgga

SEQ ID NO: 534 - DNA, 27 bp, synthetic construct
  misc_feature 1..27: note = Description of Artificial Sequence: Synthetic PCR primer
  source 1..27: mol_type = other DNA
tcctggttcatttgctagaactctgga

SEQ ID NO: 535 - DNA, 20 bp, synthetic construct
  misc_feature 1..20: note = Description of Artificial Sequence: Synthetic PCR primer
  source 1..20: mol_type = other DNA
cgtgtggtgagcctgagtct

SEQ ID NO: 536 - DNA, 25 bp, synthetic construct
  misc_feature 1..25: note = Description of Artificial Sequence: Synthetic PCR primer
  source 1..25: mol_type = other DNA
aggccctgataattcatgctaccaa

SEQ ID NO: 537 - skipped

SEQ ID NO: 538 - DNA, 20 bp, synthetic construct
  misc_feature 1..20: note = Description of Artificial Sequence: Synthetic PCR primer
  source 1..20: mol_type = other DNA
tccagatggcacattgtcag

SEQ ID NO: 539 - DNA, 20 bp, synthetic construct
  misc_feature 1..20: note = Description of Artificial Sequence: Synthetic PCR primer
  source 1..20: mol_type = other DNA
gcaggcaagctgtcaagggt

SEQ ID NO: 540 - DNA, 20 bp, synthetic construct
  misc_feature 1..20: note = Description of Artificial Sequence: Synthetic PCR primer
  source 1..20: mol_type = other DNA
gagggggaagtcaccgacaa

SEQ ID NO: 541 - DNA, 22 bp, synthetic construct
  misc_feature 1..22: note = Description of Artificial Sequence: Synthetic PCR primer
  source 1..22: mol_type = other DNA
gacaccccacacactctcatgc

SEQ ID NO: 542 - DNA, 20 bp, synthetic construct
  misc_feature 1..20: note = Description of Artificial Sequence: Synthetic PCR primer
  source 1..20: mol_type = other DNA
tcctttgaggttcatccccc

SEQ ID NO: 543 - DNA, 20 bp, synthetic construct
  misc_feature 1..20: note = Description of Artificial Sequence: Synthetic PCR primer
  source 1..20: mol_type = other DNA
cagggccaggaacacaggaa

SEQ ID NO: 544 - DNA, 22 bp, synthetic construct
  misc_feature 1..22: note = Description of Artificial Sequence: Synthetic PCR primer
  source 1..22: mol_type = other DNA
tgcagcctgagtgagcaagtgt

SEQ ID NO: 545 - DNA, 20 bp, synthetic construct
  misc_feature 1..20: note = Description of Artificial Sequence: Synthetic PCR primer
  source 1..20: mol_type = other DNA
tacagcctgggtgatggagc

SEQ ID NO: 546 - DNA, 25 bp, synthetic construct
  misc_feature 1..25: note = Description of Artificial Sequence: Synthetic PCR primer
  source 1..25: mol_type = other DNA
ggcaggcattaaactcatcaggtcc

SEQ ID NO: 547 - DNA, 20 bp, synthetic construct
  misc_feature 1..20: note = Description of Artificial Sequence: Synthetic PCR primer
  source 1..20: mol_type = other DNA
gggcctccctgctggttctc

SEQ ID NO: 548 - DNA, 20 bp, synthetic construct
  misc_feature 1..20: note = Description of Artificial Sequence: Synthetic PCR primer
  source 1..20: mol_type = other DNA
acaaacgcaggtggaccgaa

SEQ ID NO: 549 - DNA, 19 bp, synthetic construct
  misc_feature 1..19: note = Description of Artificial Sequence: Synthetic PCR primer
  source 1..19: mol_type = other DNA
aggggaggggacattgcct

SEQ ID NO: 550 - DNA, 20 bp, synthetic construct
  misc_feature 1..20: note = Description of Artificial Sequence: Synthetic PCR primer
  source 1..20: mol_type = other DNA
ctaatgcttacggctgcggg

SEQ ID NO: 551 - DNA, 20 bp, synthetic construct
  misc_feature 1..20: note = Description of Artificial Sequence: Synthetic PCR primer
  source 1..20: mol_type = other DNA
gagcgaagttaacccaccgc

SEQ ID NO: 552 - DNA, 27 bp, synthetic construct
  misc_feature 1..27: note = Description of Artificial Sequence: Synthetic PCR primer
  source 1..27: mol_type = other DNA
gcatgtgtctaactggagacaatagca

SEQ ID NO: 553 - DNA, 20 bp, synthetic construct
  misc_feature 1..20: note = Description of Artificial Sequence: Synthetic PCR primer
  source 1..20: mol_type = other DNA
gcccctcccgccttttgtgt

SEQ ID NO: 554 - DNA, 23 bp, synthetic construct
  misc_feature 1..23: note = Description of Artificial Sequence: Synthetic PCR primer
  source 1..23: mol_type = other DNA
gcctcagctctgctcttaagccc

SEQ ID NO: 555 - DNA, 20 bp, synthetic construct
  misc_feature 1..20: note = Description of Artificial Sequence: Synthetic PCR primer
  source 1..20: mol_type = other DNA
ctccagagcctggcctacca

SEQ ID NO: 556 - DNA, 23 bp, synthetic construct
  misc_feature 1..23: note = Description of Artificial Sequence: Synthetic PCR primer
  source 1..23: mol_type = other DNA
tctgtcaccacacagttaccacc

SEQ ID NO: 557 - DNA, 20 bp, synthetic construct
  misc_feature 1..20: note = Description of Artificial Sequence: Synthetic PCR primer
  source 1..20: mol_type = other DNA
ggggaccctcaagaggcact

SEQ ID NO: 558 - DNA, 20 bp, synthetic construct
  misc_feature 1..20: note = Description of Artificial Sequence: Synthetic PCR primer
  source 1..20: mol_type = other DNA
tgtggagggtgggacctggt

SEQ ID NO: 559 - DNA, 20 bp, synthetic construct
  misc_feature 1..20: note = Description of Artificial Sequence: Synthetic PCR primer
  source 1..20: mol_type = other DNA
cggggtggcagtgacgtcaa

SEQ ID NO: 560 - DNA, 20 bp, synthetic construct
  misc_feature 1..20: note = Description of Artificial Sequence: Synthetic PCR primer
  source 1..20: mol_type = other DNA
agctgaggcagagtccccga

SEQ ID NO: 561 - DNA, 20 bp, synthetic construct
  misc_feature 1..20: note = Description of Artificial Sequence: Synthetic PCR primer
  source 1..20: mol_type = other DNA
accaccagaccccacctcca

SEQ ID NO: 562 - DNA, 20 bp, synthetic construct
  misc_feature 1..20: note = Description of Artificial Sequence: Synthetic PCR primer
  source 1..20: mol_type = other DNA
gggtcaggacgcaggtcaga

SEQ ID NO: 563 - DNA, 22 bp, synthetic construct
  misc_feature 1..22: note = Description of Artificial Sequence: Synthetic PCR primer
  source 1..22: mol_type = other DNA
acactctgggctaggtgctgga

SEQ ID NO: 564 - DNA, 20 bp, synthetic construct
  misc_feature 1..20: note = Description of Artificial Sequence: Synthetic PCR primer
  source 1..20: mol_type = other DNA
ggggccattcctctgctgca

SEQ ID NO: 565 - DNA, 22 bp, synthetic construct
  misc_feature 1..22: note = Description of Artificial Sequence: Synthetic PCR primer
  source 1..22: mol_type = other DNA
acacactggctcgcattcacca

SEQ ID NO: 566 - DNA, 23 bp, synthetic construct
  misc_feature 1..23: note = Description of Artificial Sequence: Synthetic PCR primer
  source 1..23: mol_type = other DNA
tgggcacgtagtaaactgcacca

SEQ ID NO: 567 - DNA, 20 bp, synthetic construct
  misc_feature 1..20: note = Description of Artificial Sequence: Synthetic PCR primer
  source 1..20: mol_type = other DNA
tcagctggtcctgggcttgg

SEQ ID NO: 568 - DNA, 20 bp, synthetic construct
  misc_feature 1..20: note = Description of Artificial Sequence: Synthetic PCR primer
  source 1..20: mol_type = other DNA
agacacagccagggcctcag

SEQ ID NO: 569 - DNA, 21 bp, synthetic construct
  misc_feature 1..21: note = Description of Artificial Sequence: Synthetic PCR primer
  source 1..21: mol_type = other DNA
acactctcacacacgcaccaa

SEQ ID NO: 570 - DNA, 20 bp, synthetic construct
  misc_feature 1..20: note = Description of Artificial Sequence: Synthetic PCR primer
  source 1..20: mol_type = other DNA
actgcctgcatttccccggt

SEQ ID NO: 571 - DNA, 20 bp, synthetic construct
  misc_feature 1..20: note = Description of Artificial Sequence: Synthetic PCR primer
  source 1..20: mol_type = other DNA
gccaggttcattgactgccc

SEQ ID NO: 572 - DNA, 20 bp, synthetic construct
  misc_feature 1..20: note = Description of Artificial Sequence: Synthetic PCR primer
  source 1..20: mol_type = other DNA
cgagggagccgagttcgtaa

SEQ ID NO: 573 - DNA, 22 bp, synthetic construct
  misc_feature 1..22: note = Description of Artificial Sequence: Synthetic PCR primer
  source 1..22: mol_type = other DNA
tcctcgggaagtcatggcttca

SEQ ID NO: 574 - DNA, 20 bp, synthetic construct
  misc_feature 1..20: note = Description of Artificial Sequence: Synthetic PCR primer
  source 1..20: mol_type = other DNA
taaaccgttgcccccgcctc

SEQ ID NO: 575 - DNA, 20 bp, synthetic construct
  misc_feature 1..20: note = Description of Artificial Sequence: Synthetic PCR primer
  source 1..20: mol_type = other DNA
cctgctgagactccaggtcc

SEQ ID NO: 576 - DNA, 20 bp, synthetic construct
  misc_feature 1..20: note = Description of Artificial Sequence: Synthetic PCR primer
  source 1..20: mol_type = other DNA
ctcggggactgacaagccgg

SEQ ID NO: 577 - DNA, 20 bp, synthetic construct
  misc_feature 1..20: note = Description of Artificial Sequence: Synthetic PCR primer
  source 1..20: mol_type = other DNA
ccccgaccaaagcaggagca

SEQ ID NO: 578 - DNA, 20 bp, synthetic construct
  misc_feature 1..20: note = Description of Artificial Sequence: Synthetic PCR primer
  source 1..20: mol_type = other DNA
atttcagagccccggggaaa

SEQ ID NO: 579 - DNA, 24 bp, synthetic construct
  misc_feature 1..24: note = Description of Artificial Sequence: Synthetic PCR primer
  source 1..24: mol_type = other DNA
gccagtggcttagtgtctttgtgt

SEQ ID NO: 580 - DNA, 22 bp, synthetic construct
  misc_feature 1..22: note = Description of Artificial Sequence: Synthetic PCR primer
  source 1..22: mol_type = other DNA
tgccagaagaacatgggccaga

SEQ ID NO: 581 - DNA, 20 bp, synthetic construct
  misc_feature 1..20: note = Description of Artificial Sequence: Synthetic PCR primer
  source 1..20: mol_type = other DNA
gcgtgtctctgtgtgcgtgc

SEQ ID NO: 582 - DNA, 25 bp, synthetic construct
  misc_feature 1..25: note = Description of Artificial Sequence: Synthetic PCR primer
  source 1..25: mol_type = other DNA
tgcccagtccaatatttcagcagct

SEQ ID NO: 583 - DNA, 27 bp, synthetic construct
  misc_feature 1..27: note = Description of Artificial Sequence: Synthetic PCR primer
  source 1..27: mol_type = other DNA
gggtgaaaatttggtactgttagctgt

SEQ ID NO: 584 - DNA, 21 bp, synthetic construct
  misc_feature 1..21: note = Description of Artificial Sequence: Synthetic PCR primer
  source 1..21: mol_type = other DNA
tgccccatcaatcacctcggc

SEQ ID NO: 585 - DNA, 20 bp, synthetic construct
  misc_feature 1..20: note = Description of Artificial Sequence: Synthetic PCR primer
  source 1..20: mol_type = other DNA
gcctcctctgccgctggtaa

SEQ ID NO: 586 - DNA, 20 bp, synthetic construct
  misc_feature 1..20: note = Description of Artificial Sequence: Synthetic PCR primer
  source 1..20: mol_type = other DNA
gccaccaaaatagccagcgt

SEQ ID NO: 587 - DNA, 27 bp, synthetic construct
  misc_feature 1..27: note = Description of Artificial Sequence: Synthetic PCR primer
  source 1..27: mol_type = other DNA
acagactgacccttgaaaaataccagt

SEQ ID NO: 588 - DNA, 25 bp, synthetic construct
  misc_feature 1..25: note = Description of Artificial Sequence: Synthetic PCR primer
  source 1..25: mol_type = other DNA
agccaaatttctcaacagcagcact

SEQ ID NO: 589 - DNA, 20 bp, synthetic construct
  misc_feature 1..20: note = Description of Artificial Sequence: Synthetic PCR primer
  source 1..20: mol_type = other DNA
acctccttgtgctgcctggc

SEQ ID NO: 590 - DNA, 27 bp, synthetic construct
  misc_feature 1..27: note = Description of Artificial Sequence: Synthetic PCR primer
  source 1..27: mol_type = other DNA
cacaaagctctacctttccagtagtgt

SEQ ID NO: 591 - DNA, 21 bp, synthetic construct
  misc_feature 1..21: note = Description of Artificial Sequence: Synthetic PCR primer
  source 1..21: mol_type = other DNA
tgtggggattacctgcctggc

SEQ ID NO: 592 - DNA, 22 bp, synthetic construct
  misc_feature 1..22: note = Description of Artificial Sequence: Synthetic PCR primer
  source 1..22: mol_type = other DNA
tgaggcagaccagtcatccagc

SEQ ID NO: 593 - DNA, 20 bp, synthetic construct
  misc_feature 1..20: note = Description of Artificial Sequence: Synthetic PCR primer
  source 1..20: mol_type = other DNA
attagctgggcgtggcggag

SEQ ID NO: 594 - DNA, 24 bp, synthetic construct
  misc_feature 1..24: note = Description of Artificial Sequence: Synthetic PCR primer
  source 1..24: mol_type = other DNA
tgaagcagaaggagtggagaagga

SEQ ID NO: 595 - DNA, 20 bp, synthetic construct
  misc_feature 1..20: note = Description of Artificial Sequence: Synthetic PCR primer
  source 1..20: mol_type = other DNA
tggtggagtgtgtgtgtggt

SEQ ID NO: 596 - DNA, 21 bp, synthetic construct
  misc_feature 1..21: note = Description of Artificial Sequence: Synthetic PCR primer
  source 1..21: mol_type = other DNA
gcccctgtacgtcctgacagc

SEQ ID NO: 597 - DNA, 20 bp, synthetic construct
  misc_feature 1..20: note = Description of Artificial Sequence: Synthetic PCR primer
  source 1..20: mol_type = other DNA
agcgcaggtaaacaggccca

SEQ ID NO: 598 - DNA, 20 bp, synthetic construct
  misc_feature 1..20: note = Description of Artificial Sequence: Synthetic PCR primer
  source 1..20: mol_type = other DNA
atgggtgccaggtaccacgc

SEQ ID NO: 599 - DNA, 20 bp, synthetic construct
  misc_feature 1..20: note = Description of Artificial Sequence: Synthetic PCR primer
  source 1..20: mol_type = other DNA
cgggcgggtggacagatgag

SEQ ID NO: 600 - DNA, 26 bp, synthetic construct
  misc_feature 1..26: note = Description of Artificial Sequence: Synthetic PCR primer
  source 1..26: mol_type = other DNA
tcaacctagtgaacacagaccactga

SEQ ID NO: 601 - DNA, 20 bp, synthetic construct
  misc_feature 1..20: note = Description of Artificial Sequence: Synthetic PCR primer
  source 1..20: mol_type = other DNA
gccagggccagtggattgct

SEQ ID NO: 602 - DNA, 20 bp, synthetic construct
  misc_feature 1..20: note = Description of Artificial Sequence: Synthetic PCR primer
  source 1..20: mol_type = other DNA
gagccccaccggttcagtcc

SEQ ID NO: 603 - skipped

SEQ ID NO: 604 - DNA, 20 bp, synthetic construct
  misc_feature 1..20: note = Description of Artificial Sequence: Synthetic PCR primer
  source 1..20: mol_type = other DNA
ggagcagctggtcagagggg

SEQ ID NO: 605 - DNA, 25 bp, synthetic construct
  misc_feature 1..25: note = Description of Artificial Sequence: Synthetic PCR primer
  source 1..25: mol_type = other DNA
tctctccttcaactcatgaccagct

SEQ ID NO: 606 - DNA, 23 bp, synthetic construct
  misc_feature 1..23: note = Description of Artificial Sequence: Synthetic PCR primer
  source 1..23: mol_type = other DNA
tggggaatctccaaagaaccccc

SEQ ID NO: 607 - DNA, 20 bp, synthetic construct
  misc_feature 1..20: note = Description of Artificial Sequence: Synthetic PCR primer
  source 1..20: mol_type = other DNA
gatggccccactgagcacgt

SEQ ID NO: 608 - DNA, 27 bp, synthetic construct
  misc_feature 1..27: note = Description of Artificial Sequence: Synthetic PCR primer
  source 1..27: mol_type = other DNA
aggattaatgtttaaagtcactggtgg

SEQ ID NO: 609 - DNA, 24 bp, synthetic construct
  misc_feature 1..24: note = Description of Artificial Sequence: Synthetic PCR primer
  source 1..24: mol_type = other DNA
tccaagccactggtttctcagtca

SEQ ID NO: 610 - DNA, 22 bp, synthetic construct
  misc_feature 1..22: note = Description of Artificial Sequence: Synthetic PCR primer
  source 1..22: mol_type = other DNA
actttcagagcttggggcaggt

SEQ ID NO: 611 - DNA, 20 bp, synthetic construct
  misc_feature 1..20: note = Description of Artificial Sequence: Synthetic PCR primer
  source 1..20: mol_type = other DNA
caaagcatgcctttcagccg

SEQ ID NO: 612 - DNA, 20 bp, synthetic construct
  misc_feature 1..20: note = Description of Artificial Sequence: Synthetic PCR primer
  source 1..20: mol_type = other DNA
ggactccctgcagctccagc

SEQ ID NO: 613 - DNA, 20 bp, synthetic construct
  misc_feature 1..20: note = Description of Artificial Sequence: Synthetic PCR primer
  source 1..20: mol_type = other DNA
ccctttaggcaccttcccca

SEQ ID NO: 614 - DNA, 24 bp, synthetic construct
  misc_feature 1..24: note = Description of Artificial Sequence: Synthetic PCR primer
  source 1..24: mol_type = other DNA
tgattctgccttagagtcccaggt

SEQ ID NO: 615 - DNA, 20 bp, synthetic construct
  misc_feature 1..20: note = Description of Artificial Sequence: Synthetic PCR primer
  source 1..20: mol_type = other DNA
aggcaggagagcaagcaggt

SEQ ID NO: 616 - DNA, 20 bp, synthetic construct
  misc_feature 1..20: note = Description of Artificial Sequence: Synthetic PCR primer
  source 1..20: mol_type = other DNA
ctccccattgcgacccgagg

SEQ ID NO: 617 - DNA, 20 bp, synthetic construct
  misc_feature 1..20: note = Description of Artificial Sequence: Synthetic PCR primer
  source 1..20: mol_type = other DNA
ctggagcccagcaggaaggc

SEQ ID NO: 618 - DNA, 20 bp, synthetic construct
  misc_feature 1..20: note = Description of Artificial Sequence: Synthetic PCR primer
  source 1..20: mol_type = other DNA
actgtgggcgttgtccccac

SEQ ID NO: 619 - DNA, 22 bp, synthetic construct
  misc_feature 1..22: note = Description of Artificial Sequence: Synthetic PCR primer
  source 1..22: mol_type = other DNA
ggcgctccctttttccctttgt

SEQ ID NO: 620 - DNA, 21 bp, synthetic construct
  misc_feature 1..21: note = Description of Artificial Sequence: Synthetic PCR primer
  source 1..21: mol_type = other DNA
tgccatctatagcagccccct

SEQ ID NO: 621 - DNA, 24 bp, synthetic construct
  misc_feature 1..24: note = Description of Artificial Sequence: Synthetic PCR primer
  source 1..24: mol_type = other DNA
gtggagacgctaaacctgtgaggt

SEQ ID NO: 622 - DNA, 24 bp, synthetic construct
  misc_feature 1..24: note = Description of Artificial Sequence: Synthetic PCR primer
  source 1..24: mol_type = other DNA
ccgaacttctgctgagcttgatgc

SEQ ID NO: 623 - DNA, 20 bp, synthetic construct
  misc_feature 1..20: note = Description of Artificial Sequence: Synthetic PCR primer
  source 1..20: mol_type = other DNA
tgcccccaagacctttctcc

SEQ ID NO: 624 - DNA, 20 bp, synthetic construct
  misc_feature 1..20: note = Description of Artificial Sequence: Synthetic PCR primer
  source 1..20: mol_type = other DNA
gggtggggccattgtgggtt

SEQ ID NO: 625 - DNA, 23 bp, synthetic construct
  misc_feature 1..23: note = Description of Artificial Sequence: Synthetic PCR primer
  source 1..23: mol_type = other DNA
tggagaacatgagaggcttgcaa

SEQ ID NO: 626 - DNA, 20 bp, synthetic construct
  misc_feature 1..20: note = Description of Artificial Sequence: Synthetic PCR primer
  source 1..20: mol_type = other DNA
gccacatggtagaagtcggc

SEQ ID NO: 627 - DNA, 20 bp, synthetic construct
  misc_feature 1..20: note = Description of Artificial Sequence: Synthetic PCR primer
  source 1..20: mol_type = other DNA
tgtacaccccaagtcctccc

SEQ ID NO: 628 - DNA, 22 bp, synthetic construct
  misc_feature 1..22: note = Description of Artificial Sequence: Synthetic PCR primer
  source 1..22: mol_type = other DNA
aggtctggctagagatgcagca

SEQ ID NO: 629 - DNA, 22 bp, synthetic construct
  misc_feature 1..22: note = Description of Artificial Sequence: Synthetic PCR primer
  source 1..22: mol_type = other DNA
ccaagaggacccagctgttgga

SEQ ID NO: 630 - DNA, 26 bp, synthetic construct
  misc_feature 1..26: note = Description of Artificial Sequence: Synthetic PCR primer
  source 1..26: mol_type = other DNA
accatctcttcattgatgagtcccaa

SEQ ID NO: 631 - DNA, 20 bp, synthetic construct
  misc_feature 1..20: note = Description of Artificial Sequence: Synthetic PCR primer
  source 1..20: mol_type = other DNA
ggctgcggggagatgagctc

SEQ ID NO: 632 - DNA, 20 bp, synthetic construct
  misc_feature 1..20: note = Description of Artificial Sequence: Synthetic PCR primer
  source 1..20: mol_type = other DNA
tcttccaggagggcagctcc

SEQ ID NO: 633 - DNA, 20 bp, synthetic construct
  misc_feature 1..20: note = Description of Artificial Sequence: Synthetic PCR primer
  source 1..20: mol_type = other DNA
gagctgcactggatggcact

SEQ ID NO: 634 - DNA, 21 bp, synthetic construct
  misc_feature 1..21: note = Description of Artificial Sequence: Synthetic PCR primer
  source 1..21: mol_type = other DNA
tctgggaaggtgaggaggcca

SEQ ID NO: 635 - DNA, 20 bp, synthetic construct
  misc_feature 1..20: note = Description of Artificial Sequence: Synthetic PCR primer
  source 1..20: mol_type = other DNA
cttgctcccagcctgacccc

SEQ ID NO: 636 - DNA, 25 bp, synthetic construct
  misc_feature 1..25: note = Description of Artificial Sequence: Synthetic PCR primer
  source 1..25: mol_type = other DNA
gggatttttatctgttgggtgcgaa

SEQ ID NO: 637 - DNA, 20 bp, synthetic construct
  misc_feature 1..20: note = Description of Artificial Sequence: Synthetic PCR primer
  source 1..20: mol_type = other DNA
acccatcaggaccgcagcac

SEQ ID NO: 638 - DNA, 20 bp, synthetic construct
  misc_feature 1..20: note = Description of Artificial Sequence: Synthetic PCR primer
  source 1..20: mol_type = other DNA
cgtccctcacagccagcctc

SEQ ID NO: 639 - DNA, 22 bp, synthetic construct
  misc_feature 1..22: note = Description of Artificial Sequence: Synthetic PCR primer
  source 1..22: mol_type = other DNA
ccctctgcaaggtggagtctcc

SEQ ID NO: 640 - DNA, 21 bp, synthetic construct
  misc_feature 1..21: note = Description of Artificial Sequence: Synthetic PCR primer
  source 1..21: mol_type = other DNA
ggcttccactgctgaaggcct

SEQ ID NO: 641 - DNA, 22 bp, synthetic construct
  misc_feature 1..22: note = Description of Artificial Sequence: Synthetic PCR primer
  source 1..22: mol_type = other DNA
agcattgcctgtcgggtgatgt

SEQ ID NO: 642 - DNA, 21 bp, synthetic construct
  misc_feature 1..21: note = Description of Artificial Sequence: Synthetic PCR primer
  source 1..21: mol_type = other DNA
tctagagcaggggcacaatgc

SEQ ID NO: 643 - DNA, 27 bp, synthetic construct
  misc_feature 1..27: note = Description of Artificial Sequence: Synthetic PCR primer
  source 1..27: mol_type = other DNA
ggtctcagaaaatggagagaaagcacg

SEQ ID NO: 644 - DNA, 26 bp, synthetic construct
  misc_feature 1..26: note = Description of Artificial Sequence: Synthetic PCR primer
  source 1..26: mol_type = other DNA
ggttgctgataccaaaacgtttgcct

SEQ ID NO: 645 - DNA, 27 bp, synthetic construct
  misc_feature 1..27: note = Description of Artificial Sequence: Synthetic PCR primer
  source 1..27: mol_type = other DNA
actctccttaagtactgatatggctgt

SEQ ID NO: 646 - DNA, 21 bp, synthetic construct
  misc_feature 1..21: note = Description of Artificial Sequence: Synthetic PCR primer
  source 1..21: mol_type = other DNA
caatgcctgcagtcctcagga

SEQ ID NO: 647 - DNA, 20 bp, synthetic construct
  misc_feature 1..20: note = Description of Artificial Sequence: Synthetic PCR primer
  source 1..20: mol_type = other DNA
gcattggctgcccagggaaa

SEQ ID NO: 648 - DNA, 21 bp, synthetic construct
  misc_feature 1..21: note = Description of Artificial Sequence: Synthetic PCR primer
  source 1..21: mol_type = other DNA
ccacaagcctcagcctacccg

SEQ ID NO: 649 - DNA, 25 bp, synthetic construct
  misc_feature 1..25: note = Description of Artificial Sequence: Synthetic PCR primer
  source 1..25: mol_type = other DNA
gcctcttgcaaatgagactcctttt

SEQ ID NO: 650 - DNA, 20 bp, synthetic construct
  misc_feature 1..20: note = Description of Artificial Sequence: Synthetic PCR primer
  source 1..20: mol_type = other DNA
tcccagaatctgcctccgca

SEQ ID NO: 651 - skipped

SEQ ID NO: 652 - DNA, 30 bp, synthetic construct
  misc_feature 1..30: note = Description of Artificial Sequence: Synthetic PCR primer
  source 1..30: mol_type = other DNA
tcctaaaaatcagttttgagatttacttcc

SEQ ID NO: 653 - DNA, 26 bp, synthetic construct
  misc_feature 1..26: note = Description of Artificial Sequence: Synthetic PCR primer
  source 1..26: mol_type = other DNA
acatctggggaaagcaaaagtcaaca

SEQ ID NO: 654 - DNA, 26 bp, synthetic construct
  misc_feature 1..26: note = Description of Artificial Sequence: Synthetic PCR primer
  source 1..26: mol_type = other DNA
acgatcttgcttcatttccctgtaca

SEQ ID NO: 655 - DNA, 23 bp, synthetic construct
  misc_feature 1..23: note = Description of Artificial Sequence: Synthetic PCR primer
  source 1..23: mol_type = other DNA
gcaccttggtgctgctaaatgcc

SEQ ID NO: 656 - DNA, 20 bp, synthetic construct
  misc_feature 1..20: note = Description of Artificial Sequence: Synthetic PCR primer
  source 1..20: mol_type = other DNA
aactgtcctgcatccccgcc

SEQ ID NO: 657 - DNA, 20 bp, synthetic construct
  misc_feature 1..20: note = Description of Artificial Sequence: Synthetic PCR primer
  source 1..20: mol_type = other DNA
catcaccctccaccaggccc

SEQ ID NO: 658 - DNA, 20 bp, synthetic construct
  misc_feature 1..20: note = Description of Artificial Sequence: Synthetic PCR primer
  source 1..20: mol_type = other DNA
cctgacccgtggttcccgac

SEQ ID NO: 659 - DNA, 25 bp, synthetic construct
  misc_feature 1..25: note = Description of Artificial Sequence: Synthetic PCR primer
  source 1..25: mol_type = other DNA
tgggaacattggagaagtttcctga

SEQ ID NO: 660 - DNA, 21 bp, synthetic construct
  misc_feature 1..21: note = Description of Artificial Sequence: Synthetic PCR primer
  source 1..21: mol_type = other DNA
agccttggcaagcaactccct

SEQ ID NO: 661 - DNA, 20 bp, synthetic construct
  misc_feature 1..20: note = Description of Artificial Sequence: Synthetic PCR primer
  source 1..20: mol_type = other DNA
ggcagcggacttcagagcca

SEQ ID NO: 662 - DNA, 20 bp, synthetic construct
  misc_feature 1..20: note = Description of Artificial Sequence: Synthetic PCR primer
  source 1..20: mol_type = other DNA
ccagcctggtcaatatggca

SEQ ID NO: 663 - DNA, 20 bp, synthetic construct
  misc_feature 1..20: note = Description of Artificial Sequence: Synthetic PCR primer
  source 1..20: mol_type = other DNA
atgccaacactcgaggggcc

SEQ ID NO: 664 - DNA, 20 bp, synthetic construct
  misc_feature 1..20: note = Description of Artificial Sequence: Synthetic PCR primer
  source 1..20: mol_type = other DNA
ttgctctagtggggaggggg

SEQ ID NO: 665 - DNA, 26 bp, synthetic construct
  misc_feature 1..26: note = Description of Artificial Sequence: Synthetic PCR primer
  source 1..26: mol_type = other DNA
agctgaagatagcagtgtttaagcct

SEQ ID NO: 666 - DNA, 22 bp, synthetic construct
  misc_feature 1..22: note = Description of Artificial Sequence: Synthetic PCR primer
  source 1..22: mol_type = other DNA
agtcactggagtaagcctgcct

SEQ ID NO: 667 - DNA, 20 bp, synthetic construct
  misc_feature 1..20: note = Description of Artificial Sequence: Synthetic PCR primer
  source 1..20: mol_type = other DNA
gggtctccctcagtgccctg

SEQ ID NO: 668 - DNA, 21 bp, synthetic construct
  misc_feature 1..21: note = Description of Artificial Sequence: Synthetic PCR primer
  source 1..21: mol_type = other DNA
tgggggctgttaagaggcaca

SEQ ID NO: 669 - DNA, 26 bp, synthetic construct
  misc_feature 1..26: note = Description of Artificial Sequence: Synthetic PCR primer
  source 1..26: mol_type = other DNA
tcaaaacagattgaccaaggccaaat

SEQ ID NO: 670 - DNA, 24 bp, synthetic construct
  misc_feature 1..24: note = Description of Artificial Sequence: Synthetic PCR primer
  source 1..24: mol_type = other DNA
tctggcaccaggactgattgtaca

SEQ ID NO: 671 - DNA, 25 bp, synthetic construct
  misc_feature 1..25: note = Description of Artificial Sequence: Synthetic PCR primer
  source 1..25: mol_type = other DNA
agcatctgtgataccctacctgtct

SEQ ID NO: 672 - DNA, 20 bp, synthetic construct
  misc_feature 1..20: note = Description of Artificial Sequence: Synthetic PCR primer
  source 1..20: mol_type = other DNA
tagtcttgttgcccaggctg

SEQ ID NO: 673 - DNA, 20 bp, synthetic construct
  misc_feature 1..20: note = Description of Artificial Sequence: Synthetic PCR primer
  source 1..20: mol_type = other DNA
ctgcaaccagggcccttacc

SEQ ID NO: 674 - DNA, 20 bp, synthetic construct
  misc_feature 1..20: note = Description of Artificial Sequence: Synthetic PCR primer
  source 1..20: mol_type = other DNA
gcctggagagcaagcctggg

SEQ ID NO: 675 - DNA, 26 bp, synthetic construct
  misc_feature 1..26: note = Description of Artificial Sequence: Synthetic PCR primer
  source 1..26: mol_type = other DNA
agtgaaacaaacaagcagcagtctga

SEQ ID NO: 676 - DNA, 24 bp, synthetic construct
  misc_feature 1..24: note = Description of Artificial Sequence: Synthetic PCR primer
  source 1..24: mol_type = other DNA
aggctcagagaggtaagcaatgga

SEQ ID NO: 677 - DNA, 25 bp, synthetic construct
  misc_feature 1..25: note = Description of Artificial Sequence: Synthetic PCR primer
  source 1..25: mol_type = other DNA
tcagagatgttaaagccttggtggg

SEQ ID NO: 678 - DNA, 22 bp, synthetic construct
  misc_feature 1..22: note = Description of Artificial Sequence: Synthetic PCR primer
  source 1..22: mol_type = other DNA
tgtgctttctggggtagtggca

SEQ ID NO: 679 - DNA, 22 bp, synthetic construct
  misc_feature 1..22: note = Description of Artificial Sequence: Synthetic PCR primer
  source 1..22: mol_type = other DNA
ccattgggtgactgaatgcaca

SEQ ID NO: 680 - DNA, 24 bp, synthetic construct
  misc_feature 1..24: note = Description of Artificial Sequence: Synthetic PCR primer
  source 1..24: mol_type = other DNA
accaagaaagtgaaaaggaaaccc

SEQ ID NO: 681 - DNA, 22 bp, synthetic construct
  misc_feature 1..22: note = Description of Artificial Sequence: Synthetic PCR primer
  source 1..22: mol_type = other DNA
agggtggggactgaaaggagct

SEQ ID NO: 682 - DNA, 22 bp, synthetic construct
  misc_feature 1..22: note = Description of Artificial Sequence: Synthetic PCR primer
  source 1..22: mol_type = other DNA
accagtgctgtgtgaccttgga

SEQ ID NO: 683 - DNA, 21 bp, synthetic construct
  misc_feature 1..21: note = Description of Artificial Sequence: Synthetic PCR primer
  source 1..21: mol_type = other DNA
ccaggtgtggtggttcatgac

SEQ ID NO: 684 - DNA, 21 bp, synthetic construct
  misc_feature 1..21: note = Description of Artificial Sequence: Synthetic PCR primer
  source 1..21: mol_type = other DNA
caggcgctgggttcttagcct

SEQ ID NO: 685 - DNA, 20 bp, synthetic construct
  misc_feature 1..20: note = Description of Artificial Sequence: Synthetic PCR primer
  source 1..20: mol_type = other DNA
tggggtccaagatgtcccct

SEQ ID NO: 686 - DNA, 21 bp, synthetic construct
  misc_feature 1..21: note = Description of Artificial Sequence: Synthetic PCR primer
  source 1..21: mol_type = other DNA
gctgggcttggtggtatatgc

SEQ ID NO: 687 - DNA, 23 bp, synthetic construct
  misc_feature 1..23: note = Description of Artificial Sequence: Synthetic PCR primer
  source 1..23: mol_type = other DNA
agttggtgtcactgacaatggga

SEQ ID NO: 688 - DNA, 23 bp, synthetic construct
  misc_feature 1..23: note = Description of Artificial Sequence: Synthetic PCR primer
  source 1..23: mol_type = other DNA
agaggaggcacaattcaacccct

SEQ ID NO: 689 - DNA, 23 bp, synthetic construct
  misc_feature 1..23: note = Description of Artificial Sequence: Synthetic PCR primer
  source 1..23: mol_type = other DNA
gggaaagtttgggaaagtcagca

SEQ ID NO: 690 - DNA, 23 bp, synthetic construct
  misc_feature 1..23: note = Description of Artificial Sequence: Synthetic PCR primer
  source 1..23: mol_type = other DNA
tggtgcatcaaagggttgcttct

SEQ ID NO: 691 - DNA, 20 bp, synthetic construct
  misc_feature 1..20: note = Description of Artificial Sequence: Synthetic PCR primer
  source 1..20: mol_type = other DNA
cccaggctgcccatcacact

SEQ ID NO: 692 - DNA, 20 bp, synthetic construct
  misc_feature 1..20: note = Description of Artificial Sequence: Synthetic PCR primer
  source 1..20: mol_type = other DNA
tcagtgcccctgggtcctca

SEQ ID NO: 693 - DNA, 26 bp, synthetic construct
  misc_feature 1..26: note = Description of Artificial Sequence: Synthetic PCR primer
  source 1..26: mol_type = other DNA
agcactcccttttgaattttggtgct

SEQ ID NO: 694 - DNA, 20 bp, synthetic construct
  misc_feature 1..20: note = Description of Artificial Sequence: Synthetic PCR primer
  source 1..20: mol_type = other DNA
gaaaccggtccctggtgcca

SEQ ID NO: 695 - DNA, 20 bp, synthetic construct
  misc_feature 1..20: note = Description of Artificial Sequence: Synthetic PCR primer
  source 1..20: mol_type = other DNA
ttgcgggtccctgtggagtc

SEQ ID NO: 696 - skipped

SEQ ID NO: 697 - DNA, 23 bp, synthetic construct
  misc_feature 1..23: note = Description of Artificial Sequence: Synthetic PCR primer
  source 1..23: mol_type = other DNA
gccctacatctgctctccctcca

SEQ ID NO: 698 - DNA, 20 bp, synthetic construct
  misc_feature 1..20: note = Description of Artificial Sequence: Synthetic PCR primer
  source 1..20: mol_type = other DNA
ttggagtgtggcccgggttg

SEQ ID NO: 699 - DNA, 20 bp, synthetic construct
  misc_feature 1..20: note = Description of Artificial Sequence: Synthetic PCR primer
  source 1..20: mol_type = other DNA
cacaccatgctgatccaggc

SEQ ID NO: 700 - DNA, 20 bp, synthetic construct
  misc_feature 1..20: note = Description of Artificial Sequence: Synthetic PCR primer
  source 1..20: mol_type = other DNA
ctccagggctcgctgtccac

SEQ ID NO: 701 - DNA, 20 bp, synthetic construct
  misc_feature 1..20: note = Description of Artificial Sequence: Synthetic PCR primer
  source 1..20: mol_type = other DNA
ctgtggtagccgtggccagg

SEQ ID NO: 702 - DNA, 20 bp, synthetic construct
  misc_feature 1..20: note = Description of Artificial Sequence: Synthetic PCR primer
  source 1..20: mol_type = other DNA
ggtggcgggacttgaatgag

SEQ ID NO: 703 - DNA, 20 bp, synthetic construct
  misc_feature 1..20: note = Description of Artificial Sequence: Synthetic PCR primer
  source 1..20: mol_type = other DNA
ccagaggtggggccctgtga

SEQ ID NO: 704 - DNA, 24 bp, synthetic construct
  misc_feature 1..24: note = Description of Artificial Sequence: Synthetic PCR primer
  source 1..24: mol_type = other DNA
tgtgactggttgtcctgctttcct

SEQ ID NO: 705 - DNA, 20 bp, synthetic construct
  misc_feature 1..20: note = Description of Artificial Sequence: Synthetic PCR primer
  source 1..20: mol_type = other DNA
ctggccaaggggtgagtggg

SEQ ID NO: 706 - DNA, 20 bp, synthetic construct
  misc_feature 1..20: note = Description of Artificial Sequence: Synthetic PCR primer
  source 1..20: mol_type = other DNA
acggtgtgctggctgctctt

SEQ ID NO: 707 - DNA, 21 bp, synthetic construct
  misc_feature 1..21: note = Description of Artificial Sequence: Synthetic PCR primer
  source 1..21: mol_type = other DNA
tggtttgggcctcagggatgg

SEQ ID NO: 708 - DNA, 21 bp, synthetic construct
  misc_feature 1..21: note = Description of Artificial Sequence: Synthetic PCR primer
  source 1..21: mol_type = other DNA
tggtttgggcctcagggatgg

SEQ ID NO: 709 - DNA, 21 bp, synthetic construct
  misc_feature 1..21: note = Description of Artificial Sequence: Synthetic PCR primer
  source 1..21: mol_type = other DNA
tccaagtcagcgatgagggct

SEQ ID NO: 710 - DNA, 20 bp, synthetic construct
  misc_feature 1..20: note = Description of Artificial Sequence: Synthetic PCR primer
  source 1..20: mol_type = other DNA
cacccctctcagcttcccaa

SEQ ID NO: 711 - DNA, 20 bp, synthetic construct
  misc_feature 1..20: note = Description of Artificial Sequence: Synthetic PCR primer
  source 1..20: mol_type = other DNA
agaccccttggccaagcaca

SEQ ID NO: 712 - DNA, 20 bp, synthetic construct
  misc_feature 1..20: note = Description of Artificial Sequence: Synthetic PCR primer
  source 1..20: mol_type = other DNA
acatgtgggaggcggacaga

SEQ ID NO: 713 - DNA, 20 bp, synthetic construct
  misc_feature 1..20: note = Description of Artificial Sequence: Synthetic PCR primer
  source 1..20: mol_type = other DNA
ggacgactgtgcctgggaca

SEQ ID NO: 714 - DNA, 20 bp, synthetic construct
  misc_feature 1..20: note = Description of Artificial Sequence: Synthetic PCR primer
  source 1..20: mol_type = other DNA
ggagagctcagcgccaggtc

SEQ ID NO: 715 - DNA, 21 bp, synthetic construct
  misc_feature 1..21: note = Description of Artificial Sequence: Synthetic PCR primer
  source 1..21: mol_type = other DNA
gctgaagtgctctggggtgct

SEQ ID NO: 716 - DNA, 20 bp, synthetic construct
  misc_feature 1..20: note = Description of Artificial Sequence: Synthetic PCR primer
  source 1..20: mol_type = other DNA
tcggggtgcacatggccatc

SEQ ID NO: 717 - DNA, 20 bp, synthetic construct
  misc_feature 1..20: note = Description of Artificial Sequence: Synthetic PCR primer
  source 1..20: mol_type = other DNA
ctcgtgggaggccaacacct

SEQ ID NO: 718 - DNA, 20 bp, synthetic construct
  misc_feature 1..20: note = Description of Artificial Sequence: Synthetic PCR primer
  source 1..20: mol_type = other DNA
gcatgcctttaatcccggct

SEQ ID NO: 719 - DNA, 20 bp, synthetic construct
  misc_feature 1..20: note = Description of Artificial Sequence: Synthetic PCR primer
  source 1..20: mol_type = other DNA
cgcccagccacaaagtgcat

SEQ ID NO: 720 - DNA, 26 bp, synthetic construct
  misc_feature 1..26: note = Description of Artificial Sequence: Synthetic PCR primer
  source 1..26: mol_type = other DNA
agctcacaagaattggaggtaacagt

SEQ ID NO: 721 - DNA, 20 bp, synthetic construct
  misc_feature 1..20: note = Description of Artificial Sequence: Synthetic PCR primer
  source 1..20: mol_type = other DNA
aaactgggctgggcttccgg

SEQ ID NO: 722 - DNA, 20 bp, synthetic construct
  misc_feature 1..20: note = Description of Artificial Sequence: Synthetic PCR primer
  source 1..20: mol_type = other DNA
gcaggtaggcagtctggggc

SEQ ID NO: 723 - DNA, 20 bp, synthetic construct
  misc_feature 1..20: note = Description of Artificial Sequence: Synthetic PCR primer
  source 1..20: mol_type = other DNA
gcaggtaggcagtctggggc

SEQ ID NO: 724 - DNA, 20 bp, synthetic construct
  misc_feature 1..20: note = Description of Artificial Sequence: Synthetic PCR primer
  source 1..20: mol_type = other DNA
gcaggtaggcagtctggggc

SEQ ID NO: 725 - DNA, 20 bp, synthetic construct
  misc_feature 1..20: note = Description of Artificial Sequence: Synthetic PCR primer
  source 1..20: mol_type = other DNA
gctctggggtagaaggaggc

SEQ ID NO: 726 - DNA, 20 bp, synthetic construct
  misc_feature 1..20: note = Description of Artificial Sequence: Synthetic PCR primer
  source 1..20: mol_type = other DNA
tgacatgttgtgtgctgggc

SEQ ID NO: 727 - DNA, 23 bp, synthetic construct
  misc_feature 1..23: note = Description of Artificial Sequence: Synthetic PCR primer
  source 1..23: mol_type = other DNA
tcctggtgagatcgtccacagga

SEQ ID NO: 728 - DNA, 27 bp, synthetic construct
  misc_feature 1..27: note = Description of Artificial Sequence: Synthetic PCR primer
  source 1..27: mol_type = other DNA
tcctaatccaagtcctttgttcagaca

SEQ ID NO: 729 - DNA, 20 bp, synthetic construct
  misc_feature 1..20: note = Description of Artificial Sequence: Synthetic PCR primer
  source 1..20: mol_type = other DNA
gggacaccagttccttccat

SEQ ID NO: 730 - DNA, 25 bp, synthetic construct
  misc_feature 1..25: note = Description of Artificial Sequence: Synthetic PCR primer
  source 1..25: mol_type = other DNA
acaccactatcaaggcagagtaggt

SEQ ID NO: 731 - DNA, 20 bp, synthetic construct
  misc_feature 1..20: note = Description of Artificial Sequence: Synthetic PCR primer
  source 1..20: mol_type = other DNA
ctgggagcggagggaagtgc

SEQ ID NO: 732 - DNA, 20 bp, synthetic construct
  misc_feature 1..20: note = Description of Artificial Sequence: Synthetic PCR primer
  source 1..20: mol_type = other DNA
cgggtctcggaatgcctcca

SEQ ID NO: 733 - DNA, 20 bp, synthetic construct
  misc_feature 1..20: note = Description of Artificial Sequence: Synthetic PCR primer
  source 1..20: mol_type = other DNA
ttgctgtggtcccggtggtg

SEQ ID NO: 734 - DNA, 20 bp, synthetic construct
  misc_feature 1..20: note = Description of Artificial Sequence: Synthetic PCR primer
  source 1..20: mol_type = other DNA
ggtgtggtgacaggtcgggt

SEQ ID NO: 735 - DNA, 20 bp, synthetic construct
  misc_feature 1..20: note = Description of Artificial Sequence: Synthetic PCR primer
  source 1..20: mol_type = other DNA
ctcccaggacagtgctcggc

SEQ ID NO: 736 - DNA, 22 bp, synthetic construct
  misc_feature 1..22: note = Description of Artificial Sequence: Synthetic PCR primer
  source 1..22: mol_type = other DNA
tgcgtaggttttgcctctgtga

SEQ ID NO: 737 - DNA, 20 bp, synthetic construct
  misc_feature 1..20: note = Description of Artificial Sequence: Synthetic PCR primer
  source 1..20: mol_type = other DNA
ctccgcagccaccgttggta

SEQ ID NO: 738 - DNA, 22 bp, synthetic construct
  misc_feature 1..22: note = Description of Artificial Sequence: Synthetic PCR primer
  source 1..22: mol_type = other DNA
acctgcagcatgaactctcgca

SEQ ID NO: 739 - DNA, 23 bp, synthetic construct
  misc_feature 1..23: note = Description of Artificial Sequence: Synthetic PCR primer
  source 1..23: mol_type = other DNA
tctccagtttcttgctctcatgg

SEQ ID NO: 740 - DNA, 22 bp, synthetic construct
  misc_feature 1..22: note = Description of Artificial Sequence: Synthetic PCR primer
  source 1..22: mol_type = other DNA
tggggtggtggtcttgaatcca

SEQ ID NO: 741 - DNA, 21 bp, synthetic construct
  misc_feature 1..21: note = Description of Artificial Sequence: Synthetic PCR primer
  source 1..21: mol_type = other DNA
agcagccagtccagtgtcctg

SEQ ID NO: 742 - DNA, 20 bp, synthetic construct
  misc_feature 1..20: note = Description of Artificial Sequence: Synthetic PCR primer
  source 1..20: mol_type = other DNA
tggacgctgctgggaggaga

SEQ ID NO: 743 - DNA, 22 bp, synthetic construct
  misc_feature 1..22: note = Description of Artificial Sequence: Synthetic PCR primer
  source 1..22: mol_type = other DNA
aggtttgcactctgttgcctgg

SEQ ID NO: 744 - DNA, 22 bp, synthetic construct
  misc_feature 1..22: note = Description of Artificial Sequence: Synthetic PCR primer
  source 1..22: mol_type = other DNA
tcttcctttgccaggcagcaca

SEQ ID NO: 745 - DNA, 20 bp, synthetic construct
  misc_feature 1..20: note = Description of Artificial Sequence: Synthetic PCR primer
  source 1..20: mol_type = other DNA
ggacgcctactgcctggacc

SEQ ID NO: 746 - DNA, 20 bp, synthetic construct
  misc_feature 1..20: note = Description of Artificial Sequence: Synthetic PCR primer
  source 1..20: mol_type = other DNA
aggcagtcatcgccttgcta

SEQ ID NO: 747 - DNA, 20 bp, synthetic construct
  misc_feature 1..20: note = Description of Artificial Sequence: Synthetic PCR primer
  source 1..20: mol_type = other DNA
ccccagcccccaccagtttc

SEQ ID NO: 748 - DNA, 20 bp, synthetic construct
  misc_feature 1..20: note = Description of Artificial Sequence: Synthetic PCR primer
  source 1..20: mol_type = other DNA
agggagcaggaaagtgaggt

SEQ ID NO: 749 - DNA, 20 bp, synthetic construct
  misc_feature 1..20: note = Description of Artificial Sequence: Synthetic PCR primer
  source 1..20: mol_type = other DNA
acccagactcctggtgtggc

SEQ ID NO: 750 - DNA, 20 bp, synthetic construct
  misc_feature 1..20: note = Description of Artificial Sequence: Synthetic PCR primer
  source 1..20: mol_type = other DNA
accaccctttcccccagaaa

SEQ ID NO: 751 - DNA, 21 bp, synthetic construct
  misc_feature 1..21: note = Description of Artificial Sequence: Synthetic PCR primer
  source 1..21: mol_type = other DNA
gaatcactgcacctggccatc

SEQ ID NO: 752 - DNA, 20 bp, synthetic construct
  misc_feature 1..20: note = Description of Artificial Sequence: Synthetic PCR primer
  source 1..20: mol_type = other DNA
taaagggcgtgctgggagag

SEQ ID NO: 753 - DNA, 20 bp, synthetic construct
  misc_feature 1..20: note = Description of Artificial Sequence: Synthetic PCR primer
  source 1..20: mol_type = other DNA
tgcagggccatcttgtgtgt

SEQ ID NO: 754 - DNA, 20 bp, synthetic construct
  misc_feature 1..20: note = Description of Artificial Sequence: Synthetic PCR primer
  source 1..20: mol_type = other DNA
ctgggtctgttccctgtggg

SEQ ID NO: 755 - DNA, 20 bp, synthetic construct
  misc_feature 1..20: note = Description of Artificial Sequence: Synthetic PCR primer
  source 1..20: mol_type = other DNA
gcaggtcaagttggaacccg

SEQ ID NO: 756 - DNA, 21 bp, synthetic construct
  misc_feature 1..21: note = Description of Artificial Sequence: Synthetic PCR primer
  source 1..21: mol_type = other DNA
agatttgtgcactgcctgcct

SEQ ID NO: 757 - DNA, 20 bp, synthetic construct
  misc_feature 1..20: note = Description of Artificial Sequence: Synthetic PCR primer
  source 1..20: mol_type = other DNA
ggacctctgcacaccctggc

SEQ ID NO: 758 - DNA, 20 bp, synthetic construct
  misc_feature 1..20: note = Description of Artificial Sequence: Synthetic PCR primer
  source 1..20: mol_type = other DNA
caggagggggaagtgtgtcc

SEQ ID NO: 759 - DNA, 22 bp, synthetic construct
  misc_feature 1..22: note = Description of Artificial Sequence: Synthetic PCR primer
  source 1..22: mol_type = other DNA
gagagcaagtttgttccccagg

SEQ ID NO: 760 - DNA, 20 bp, synthetic construct
  misc_feature 1..20: note = Description of Artificial Sequence: Synthetic PCR primer
  source 1..20: mol_type = other DNA
gctgctggtaggggagctgg

SEQ ID NO: 761 - DNA, 20 bp, synthetic construct
  misc_feature 1..20: note = Description of Artificial Sequence: Synthetic PCR primer
  source 1..20: mol_type = other DNA
gggtgacgcttgccatgagc

SEQ ID NO: 762 - DNA, 21 bp, synthetic construct
  misc_feature 1..21: note = Description of Artificial Sequence: Synthetic PCR primer
  source 1..21: mol_type = other DNA
gctgagacaaccagcccagct

SEQ ID NO: 763 - DNA, 20 bp, synthetic construct
  misc_feature 1..20: note = Description of Artificial Sequence: Synthetic PCR primer
  source 1..20: mol_type = other DNA
gcagccgatccacactgggg

SEQ ID NO: 764 - DNA, 21 bp, synthetic construct
  misc_feature 1..21: note = Description of Artificial Sequence: Synthetic PCR primer
  source 1..21: mol_type = other DNA
cccaggagcagggtacaatgc

SEQ ID NO: 765 - DNA, 21 bp, synthetic construct
  misc_feature 1..21: note = Description of Artificial Sequence: Synthetic PCR primer
  source 1..21: mol_type = other DNA
ccttggaaggggccttggtgg

SEQ ID NO: 766 - DNA, 20 bp, synthetic construct
  misc_feature 1..20: note = Description of Artificial Sequence: Synthetic PCR primer
  source 1..20: mol_type = other DNA
ggctgctgcgagttgccaac

SEQ ID NO: 767 - DNA, 20 bp, synthetic construct
  misc_feature 1..20: note = Description of Artificial Sequence: Synthetic PCR primer
  source 1..20: mol_type = other DNA
gggttgcttgccctctgtgt

SEQ ID NO: 768 - DNA, 22 bp, synthetic construct
  misc_feature 1..22: note = Description of Artificial Sequence: Synthetic PCR primer
  source 1..22: mol_type = other DNA
cacagaaggatgtgtgcaggtt

SEQ ID NO: 769 - DNA, 21 bp, synthetic construct
  misc_feature 1..21: note = Description of Artificial Sequence: Synthetic PCR primer
  source 1..21: mol_type = other DNA
ggtcaggtgtgctgctaggca

SEQ ID NO: 770 - DNA, 21 bp, synthetic construct
  misc_feature 1..21: note = Description of Artificial Sequence: Synthetic PCR primer
  source 1..21: mol_type = other DNA
actgcctgccaaagtgggtgt

SEQ ID NO: 771 - DNA, 20 bp, synthetic construct
  misc_feature 1..20: note = Description of Artificial Sequence: Synthetic PCR primer
  source 1..20: mol_type = other DNA
tgccgggtaatagctggctt

SEQ ID NO: 772 - DNA, 20 bp, synthetic construct
  misc_feature 1..20: note = Description of Artificial Sequence: Synthetic PCR primer
  source 1..20: mol_type = other DNA
gggggcttccaggtcacagg

SEQ ID NO: 773 - DNA, 23 bp, synthetic construct
  misc_feature 1..23: note = Description of Artificial Sequence: Synthetic PCR primer
  source 1..23: mol_type = other DNA
acaggtccatgcttagcagaggg

SEQ ID NO: 774 - DNA, 20 bp, synthetic construct
  misc_feature 1..20: note = Description of Artificial Sequence: Synthetic PCR primer
  source 1..20: mol_type = other DNA
ccgagtccgtggcagagagc

SEQ ID NO: 775 - DNA, 24 bp, synthetic construct
  misc_feature 1..24: note = Description of Artificial Sequence: Synthetic PCR primer
  source 1..24: mol_type = other DNA
tggcccaattggaagtgatttcgt

SEQ ID NO: 776 - DNA, 22 bp, synthetic construct
  misc_feature 1..22: note = Description of Artificial Sequence: Synthetic PCR primer
  source 1..22: mol_type = other DNA
ggcccaatcggtagaggatgca

SEQ ID NO: 777 - DNA, 20 bp, synthetic construct
  misc_feature 1..20: note = Description of Artificial Sequence: Synthetic PCR primer
  source 1..20: mol_type = other DNA
tgcacccacacagccagcaa

SEQ ID NO: 778 - DNA, 20 bp, synthetic construct
  misc_feature 1..20: note = Description of Artificial Sequence: Synthetic PCR primer
  source 1..20: mol_type = other DNA
aattagctgggcgcggtggt

SEQ ID NO: 779 - DNA, 20 bp, synthetic construct
  misc_feature 1..20: note = Description of Artificial Sequence: Synthetic PCR primer
  source 1..20: mol_type = other DNA
caggcggccccttgaggaat

SEQ ID NO: 780 - DNA, 22 bp, synthetic construct
  misc_feature 1..22: note = Description of Artificial Sequence: Synthetic PCR primer
  source 1..22: mol_type = other DNA
tgaggagaacaccacaggcaga

SEQ ID NO: 781 - DNA, 20 bp, synthetic construct
  misc_feature 1..20: note = Description of Artificial Sequence: Synthetic PCR primer
  source 1..20: mol_type = other DNA
cccctcactcaagcaggccc

SEQ ID NO: 782 - DNA, 20 bp, synthetic construct
  misc_feature 1..20: note = Description of Artificial Sequence: Synthetic PCR primer
  source 1..20: mol_type = other DNA
caggggcagtggcaggagtc

SEQ ID NO: 783 - DNA, 20 bp, synthetic construct
  misc_feature 1..20: note = Description of Artificial Sequence: Synthetic PCR primer
  source 1..20: mol_type = other DNA
gggaagggggaacaggtgca

SEQ ID NO: 784 - DNA, 21 bp, synthetic construct
  misc_feature 1..21: note = Description of Artificial Sequence: Synthetic PCR primer
  source 1..21: mol_type = other DNA
gctgctcgcagttaagcacca

SEQ ID NO: 785 - DNA, 20 bp, synthetic construct
  misc_feature 1..20: note = Description of Artificial Sequence: Synthetic PCR primer
  source 1..20: mol_type = other DNA
ggttccacaagctgggggca

SEQ ID NO: 786 - DNA, 23 bp, synthetic construct
  misc_feature 1..23: note = Description of Artificial Sequence: Synthetic PCR primer
  source 1..23: mol_type = other DNA
agagtcatccatttcctgggggc

SEQ ID NO: 787 - DNA, 27 bp, synthetic construct
  misc_feature 1..27: note = Description of Artificial Sequence: Synthetic PCR primer
  source 1..27: mol_type = other DNA
agggaatcctttttccattgcttgttt

SEQ ID NO: 788 - DNA, 20 bp, synthetic construct
  misc_feature 1..20: note = Description of Artificial Sequence: Synthetic PCR primer
  source 1..20: mol_type = other DNA
gcctcccctcctccttccca

SEQ ID NO: 789 - DNA, 20 bp, synthetic construct
  misc_feature 1..20: note = Description of Artificial Sequence: Synthetic PCR primer
  source 1..20: mol_type = other DNA
tctgaccggtatgcctgacg

SEQ ID NO: 790 - DNA, 24 bp, synthetic construct
  misc_feature 1..24: note = Description of Artificial Sequence: Synthetic PCR primer
  source 1..24: mol_type = other DNA
tggtctagtacttcctccagcctt

SEQ ID NO: 791 - DNA, 20 bp, synthetic construct
  misc_feature 1..20: note = Description of Artificial Sequence: Synthetic PCR primer
  source 1..20: mol_type = other DNA
cccactgctcctagccctgc

SEQ ID NO: 792 - DNA, 27 bp, synthetic construct
  misc_feature 1..27: note = Description of Artificial Sequence: Synthetic PCR primer
  source 1..27: mol_type = other DNA
agctttggtagttggagtctttgaagg

SEQ ID NO: 793 - DNA, 20 bp, synthetic construct
  misc_feature 1..20: note = Description of Artificial Sequence: Synthetic PCR primer
  source 1..20: mol_type = other DNA
gcacagcctgcccttggaag

SEQ ID NO: 794 - DNA, 20 bp, synthetic construct
  misc_feature 1..20: note = Description of Artificial Sequence: Synthetic PCR primer
  source 1..20: mol_type = other DNA
agcggcttctgcttctgcga

SEQ ID NO: 795 - DNA, 20 bp, synthetic construct
  misc_feature 1..20: note = Description of Artificial Sequence: Synthetic PCR primer
  source 1..20: mol_type = other DNA
gagttcctcctcccgccagt

SEQ ID NO: 796 - DNA, 20 bp, synthetic construct
  misc_feature 1..20: note = Description of Artificial Sequence: Synthetic PCR primer
  source 1..20: mol_type = other DNA
gcttttgcctgggactccgc

SEQ ID NO: 797 - DNA, 21 bp, synthetic construct
  misc_feature 1..21: note = Description of Artificial Sequence: Synthetic PCR primer
  source 1..21: mol_type = other DNA
gctctgtcccacttcccctgg

SEQ ID NO: 798 - DNA, 21 bp, synthetic construct
  misc_feature 1..21: note = Description of Artificial Sequence: Synthetic PCR primer
  source 1..21: mol_type = other DNA
cgcccctagagctaagggggt

SEQ ID NO: 799 - DNA, 21 bp, synthetic construct
  misc_feature 1..21: note = Description of Artificial Sequence: Synthetic PCR primer
  source 1..21: mol_type = other DNA
agggctaggactgcagtgagc

SEQ ID NO: 800 - DNA, 21 bp, synthetic construct
  misc_feature 1..21: note = Description of Artificial Sequence: Synthetic PCR primer
  source 1..21: mol_type = other DNA
gcctggggctgtgagtagttt

SEQ ID NO: 801 - DNA, 20 bp, synthetic construct
  misc_feature 1..20: note = Description of Artificial Sequence: Synthetic PCR primer
  source 1..20: mol_type = other DNA
acttggcaggctgaggcagg

SEQ ID NO: 802 - DNA, 22 bp, synthetic construct
  misc_feature 1..22: note = Description of Artificial Sequence: Synthetic PCR primer
  source 1..22: mol_type = other DNA
cagcagaaagttcatggtttcg

SEQ ID NO: 803 - DNA, 24 bp, synthetic construct
  misc_feature 1..24: note = Description of Artificial Sequence: Synthetic PCR primer
  source 1..24: mol_type = other DNA
actgatcgatgatggcctatgggt

SEQ ID NO: 804 - DNA, 20 bp, synthetic construct
  misc_feature 1..20: note = Description of Artificial Sequence: Synthetic PCR primer
  source 1..20: mol_type = other DNA
gcagcctattgtctcctggt

SEQ ID NO: 805 - DNA, 21 bp, synthetic construct
  misc_feature 1..21: note = Description of Artificial Sequence: Synthetic PCR primer
  source 1..21: mol_type = other DNA
agcatcatgcctccagcttca

SEQ ID NO: 806 - DNA, 20 bp, synthetic construct
  misc_feature 1..20: note = Description of Artificial Sequence: Synthetic PCR primer
  source 1..20: mol_type = other DNA
gcagctcccaccaccctcag

SEQ ID NO: 807 - DNA, 20 bp, synthetic construct
  misc_feature 1..20: note = Description of Artificial Sequence: Synthetic PCR primer
  source 1..20: mol_type = other DNA
gtgcgtgtccgttcacccct

SEQ ID NO: 808 - DNA, 20 bp, synthetic construct
  misc_feature 1..20: note = Description of Artificial Sequence: Synthetic PCR primer
  source 1..20: mol_type = other DNA
cgtgattcgagttcctggca

SEQ ID NO: 809 - DNA, 20 bp, synthetic construct
  misc_feature 1..20: note = Description of Artificial Sequence: Synthetic PCR primer
  source 1..20: mol_type = other DNA
ctgcgagatgccccaaatcg

SEQ ID NO: 810 - DNA, 20 bp, synthetic construct
  misc_feature 1..20: note = Description of Artificial Sequence: Synthetic PCR primer
  source 1..20: mol_type = other DNA
tgctgggattacaggcgcga

SEQ ID NO: 811 - DNA, 21 bp, synthetic construct
  misc_feature 1..21: note = Description of Artificial Sequence: Synthetic PCR primer
  source 1..21: mol_type = other DNA
tgcctggccctctctgagtct

SEQ ID NO: 812 - DNA, 20 bp, synthetic construct
  misc_feature 1..20: note = Description of Artificial Sequence: Synthetic PCR primer
  source 1..20: mol_type = other DNA
cagcgcagtccagcccgatg

SEQ ID NO: 813 - DNA, 24 bp, synthetic construct
  misc_feature 1..24: note = Description of Artificial Sequence: Synthetic PCR primer
  source 1..24: mol_type = other DNA
gctacaggttgcacagtgagaggt

SEQ ID NO: 814 - DNA, 21 bp, synthetic construct
  misc_feature 1..21: note = Description of Artificial Sequence: Synthetic PCR primer
  source 1..21: mol_type = other DNA
cccagccgttccaggtcttcc

SEQ ID NO: 815 - DNA, 20 bp, synthetic construct
  misc_feature 1..20: note = Description of Artificial Sequence: Synthetic PCR primer
  source 1..20: mol_type = other DNA
tccagggtccttctcggccc

SEQ ID NO: 816 - DNA, 20 bp, synthetic construct
  misc_feature 1..20: note = Description of Artificial Sequence: Synthetic PCR primer
  source 1..20: mol_type = other DNA
catggggctcggacctcgtc

SEQ ID NO: 817 - DNA, 20 bp, synthetic construct
  misc_feature 1..20: note = Description of Artificial Sequence: Synthetic PCR primer
  source 1..20: mol_type = other DNA
tgccaggaaggaagctggcc

SEQ ID NO: 818 - DNA, 20 bp, synthetic construct
  misc_feature 1..20: note = Description of Artificial Sequence: Synthetic PCR primer
  source 1..20: mol_type = other DNA
cccttagctgcagtcgcccc

SEQ ID NO: 819 - DNA, 20 bp, synthetic construct
  misc_feature 1..20: note = Description of Artificial Sequence: Synthetic PCR primer
  source 1..20: mol_type = other DNA
tgaagatgggcagtttgggg

SEQ ID NO: 820 - DNA, 20 bp, synthetic construct
  misc_feature 1..20: note = Description of Artificial Sequence: Synthetic PCR primer
  source 1..20: mol_type = other DNA
actggggttggggaggggat

SEQ ID NO: 821 - DNA, 22 bp, synthetic construct
  misc_feature 1..22: note = Description of Artificial Sequence: Synthetic PCR primer
  source 1..22: mol_type = other DNA
ccatttgtgctgatctgtgggt

SEQ ID NO: 822 - DNA, 22 bp, synthetic construct
  misc_feature 1..22: note = Description of Artificial Sequence: Synthetic PCR primer
  source 1..22: mol_type = other DNA
aggaaatgtgttgtgccagggc

SEQ ID NO: 823 - DNA, 27 bp, synthetic construct
  misc_feature 1..27: note = Description of Artificial Sequence: Synthetic PCR primer
  source 1..27: mol_type = other DNA
gccaagtgttactcatcaagaaagtgg

SEQ ID NO: 824 - DNA, 20 bp, synthetic construct
  misc_feature 1..20: note = Description of Artificial Sequence: Synthetic PCR primer
  source 1..20: mol_type = other DNA
tcccgaactcccgcaaaacg

SEQ ID NO: 825 - DNA, 20 bp, synthetic construct
  misc_feature 1..20: note = Description of Artificial Sequence: Synthetic PCR primer
  source 1..20: mol_type = other DNA
ctggaaccgcatcctccgca

SEQ ID NO: 826 - DNA, 20 bp, synthetic construct
  misc_feature 1..20: note = Description of Artificial Sequence: Synthetic PCR primer
  source 1..20: mol_type = other DNA
ggctgtgccttccgatggaa

SEQ ID NO: 827 - DNA, 26 bp, synthetic construct
  misc_feature 1..26: note = Description of Artificial Sequence: Synthetic PCR primer
  source 1..26: mol_type = other DNA
aggcttctggaaaagtcctcaatgca

SEQ ID NO: 828 - DNA, 23 bp, synthetic construct
  misc_feature 1..23: note = Description of Artificial Sequence: Synthetic PCR primer
  source 1..23: mol_type = other DNA
agccacacatctttctggtaggg

SEQ ID NO: 829 - DNA, 21 bp, synthetic construct
  misc_feature 1..21: note = Description of Artificial Sequence: Synthetic PCR primer
  source 1..21: mol_type = other DNA
agggtggggtgtactggctca

SEQ ID NO: 830 - DNA, 20 bp, synthetic construct
  misc_feature 1..20: note = Description of Artificial Sequence: Synthetic PCR primer
  source 1..20: mol_type = other DNA
tggccttgaactcttgggct

SEQ ID NO: 831 - DNA, 20 bp, synthetic construct
  misc_feature 1..20: note = Description of Artificial Sequence: Synthetic PCR primer
  source 1..20: mol_type = other DNA
cagtaggtggtcccttccgc

SEQ ID NO: 832 - skipped

SEQ ID NO: 833 - DNA, 20 bp, synthetic construct
  misc_feature 1..20: note = Description of Artificial Sequence: Synthetic PCR primer
  source 1..20: mol_type = other DNA
aagccgaaaagctgggcaaa

SEQ ID NO: 834 - DNA, 20 bp, synthetic construct
  misc_feature 1..20: note = Description of Artificial Sequence: Synthetic PCR primer
  source 1..20: mol_type = other DNA
acacagtcagagctccgccg

SEQ ID NO: 835 - DNA, 21 bp, synthetic construct
  misc_feature 1..21: note = Description of Artificial Sequence: Synthetic PCR primer
  source 1..21: mol_type = other DNA
tcgactggtcttgtcctccca

SEQ ID NO: 836 - DNA, 21 bp, synthetic construct
  misc_feature 1..21: note = Description of Artificial Sequence: Synthetic PCR primer
  source 1..21: mol_type = other DNA
tgcagccaagagaaaaagcct

SEQ ID NO: 837 - DNA, 21 bp, synthetic construct
  misc_feature 1..21: note = Description of Artificial Sequence: Synthetic PCR primer
  source 1..21: mol_type = other DNA
acccgacttcctccccattgc

SEQ ID NO: 838 - DNA, 20 bp, synthetic construct
  misc_feature 1..20: note = Description of Artificial Sequence: Synthetic PCR primer
  source 1..20: mol_type = other DNA
gccaggaggacaccaggacc

SEQ ID NO: 839 - DNA, 20 bp, synthetic construct
  misc_feature 1..20: note = Description of Artificial Sequence: Synthetic PCR primer
  source 1..20: mol_type = other DNA
ggcctgagagtggagagtgg

SEQ ID NO: 840 - DNA, 26 bp, synthetic construct
  misc_feature 1..26: note = Description of Artificial Sequence: Synthetic PCR primer
  source 1..26: mol_type = other DNA
acctctccaagtctcagtaactctct

SEQ ID NO: 841 - DNA, 20 bp, synthetic construct
  misc_feature 1..20: note = Description of Artificial Sequence: Synthetic PCR primer
  source 1..20: mol_type = other DNA
ctttggtggacctgcacagc

SEQ ID NO: 842 - DNA, 23 bp, synthetic construct
  misc_feature 1..23: note = Description of Artificial Sequence: Synthetic PCR primer
  source 1..23: mol_type = other DNA
gctgggactacagacatgtgcca

SEQ ID NO: 843 - DNA, 23 bp, synthetic construct
  misc_feature 1..23: note = Description of Artificial Sequence: Synthetic PCR primer
  source 1..23: mol_type = other DNA
aaatcctgcatggtgatgggagt

SEQ ID NO: 844 - DNA, 24 bp, synthetic construct
  misc_feature 1..24: note = Description of Artificial Sequence: Synthetic PCR primer
  source 1..24: mol_type = other DNA
acagcctcttctccatgactgagc

SEQ ID NO: 845 - DNA, 20 bp, synthetic construct
  misc_feature 1..20: note = Description of Artificial Sequence: Synthetic PCR primer
  source 1..20: mol_type = other DNA
gcggtggggaagccattgag

SEQ ID NO: 846 - DNA, 20 bp, synthetic construct
  misc_feature 1..20: note = Description of Artificial Sequence: Synthetic PCR primer
  source 1..20: mol_type = other DNA
cctgtcgggagagtgcctgc

SEQ ID NO: 847 - DNA, 21 bp, synthetic construct
  misc_feature 1..21: note = Description of Artificial Sequence: Synthetic PCR primer
  source 1..21: mol_type = other DNA
actccagatgcaaccagggct

SEQ ID NO: 848 - DNA, 20 bp, synthetic construct
  misc_feature 1..20: note = Description of Artificial Sequence: Synthetic PCR primer
  source 1..20: mol_type = other DNA
gcttcaccgtagaggctgct

SEQ ID NO: 849 - DNA, 26 bp, synthetic construct
  misc_feature 1..26: note = Description of Artificial Sequence: Synthetic PCR primer
  source 1..26: mol_type = other DNA
tcagtgacaaccttttgtattcggca

SEQ ID NO: 850 - DNA, 20 bp, synthetic construct
  misc_feature 1..20: note = Description of Artificial Sequence: Synthetic PCR primer
  source 1..20: mol_type = other DNA
agggagcaggaaagtgaggt

SEQ ID NO: 851 - DNA, 20 bp, synthetic construct
  misc_feature 1..20: note = Description of Artificial Sequence: Synthetic PCR primer
  source 1..20: mol_type = other DNA
caccgacacacccactcacc

SEQ ID NO: 852 - DNA, 20 bp, synthetic construct
  misc_feature 1..20: note = Description of Artificial Sequence: Synthetic PCR primer
  source 1..20: mol_type = other DNA
tacccgggccgtctgttaga

SEQ ID NO: 853 - DNA, 20 bp, synthetic construct
  misc_feature 1..20: note = Description of Artificial Sequence: Synthetic PCR primer
  source 1..20: mol_type = other DNA
tgaatcccttcacccccaag

SEQ ID NO: 854 - DNA, 20 bp, synthetic construct
  misc_feature 1..20: note = Description of Artificial Sequence: Synthetic PCR primer
  source 1..20: mol_type = other DNA
ccaatccaggatgattccgc

SEQ ID NO: 855 - DNA, 20 bp, synthetic construct
  misc_feature 1..20: note = Description of Artificial Sequence: Synthetic PCR primer
  source 1..20: mol_type = other DNA
gggaggtatgtgcgggagtg

SEQ ID NO: 856 - DNA, 20 bp, synthetic construct
  misc_feature 1..20: note = Description of Artificial Sequence: Synthetic PCR primer
  source 1..20: mol_type = other DNA
gcccaggtgctaagcccctc

SEQ ID NO: 857 - DNA, 23 bp, synthetic construct
  misc_feature 1..23: note = Description of Artificial Sequence: Synthetic PCR primer
  source 1..23: mol_type = other DNA
tgtgtcatggactttcccattgt

SEQ ID NO: 858 - DNA, 24 bp, synthetic construct
  misc_feature 1..24: note = Description of Artificial Sequence: Synthetic PCR primer
  source 1..24: mol_type = other DNA
tctcccccaaggtatcagagagct

SEQ ID NO: 859 - DNA, 20 bp, synthetic construct
  misc_feature 1..20: note = Description of Artificial Sequence: Synthetic PCR primer
  source 1..20: mol_type = other DNA
gctgccgtccgaacccaaga

SEQ ID NO: 860 - DNA, 21 bp, synthetic construct
  misc_feature 1..21: note = Description of Artificial Sequence: Synthetic PCR primer
  source 1..21: mol_type = other DNA
actccgaaaatgccccgcagt

SEQ ID NO: 861 - DNA, 21 bp, synthetic construct
  misc_feature 1..21: note = Description of Artificial Sequence: Synthetic PCR primer
  source 1..21: mol_type = other DNA
ttgagagggttcagtggttgc

SEQ ID NO: 862 - DNA, 20 bp, synthetic construct
  misc_feature 1..20: note = Description of Artificial Sequence: Synthetic PCR primer
  source 1..20: mol_type = other DNA
agccaacggcagatgcaaat

SEQ ID NO: 863 - DNA, 20 bp, synthetic construct
  misc_feature 1..20: note = Description of Artificial Sequence: Synthetic PCR primer
  source 1..20: mol_type = other DNA
cacacatgcacatgcccctg

SEQ ID NO: 864 - DNA, 21 bp, synthetic construct
  misc_feature 1..21: note = Description of Artificial Sequence: Synthetic PCR primer
  source 1..21: mol_type = other DNA
tcccccatatcaacacacaca

SEQ ID NO: 865 - DNA, 24 bp, synthetic construct
  misc_feature 1..24: note = Description of Artificial Sequence: Synthetic PCR primer
  source 1..24: mol_type = other DNA
tgggcaaaggacatgaaacagaca

SEQ ID NO: 866 - DNA, 27 bp, synthetic construct
  misc_feature 1..27: note = Description of Artificial Sequence: Synthetic PCR primer
  source 1..27: mol_type = other DNA
acgaacagatcatttttcatggcttcc

SEQ ID NO: 867 - DNA, 20 bp, synthetic construct
  misc_feature 1..20: note = Description of Artificial Sequence: Synthetic PCR primer
  source 1..20: mol_type = other DNA
ccctctccggaagtgccttg

SEQ ID NO: 868 - DNA, 20 bp, synthetic construct
  misc_feature 1..20: note = Description of Artificial Sequence: Synthetic PCR primer
  source 1..20: mol_type = other DNA
gttgcctggggatggggtat

SEQ ID NO: 869 - DNA, 20 bp, synthetic construct
  misc_feature 1..20: note = Description of Artificial Sequence: Synthetic PCR primer
  source 1..20: mol_type = other DNA
gggcatcaaaggatggggat

SEQ ID NO: 870 - DNA, 22 bp, synthetic construct
  misc_feature 1..22: note = Description of Artificial Sequence: Synthetic PCR primer
  source 1..22: mol_type = other DNA
acagtgaggtgcggtctttggg

SEQ ID NO: 871 - DNA, 20 bp, synthetic construct
  misc_feature 1..20: note = Description of Artificial Sequence: Synthetic PCR primer
  source 1..20: mol_type = other DNA
ggtgcagtccaagagccccc

SEQ ID NO: 872 - DNA, 20 bp, synthetic construct
  misc_feature 1..20: note = Description of Artificial Sequence: Synthetic PCR primer
  source 1..20: mol_type = other DNA
gggagacagagcagcgcctc

SEQ ID NO: 873 - DNA, 22 bp, synthetic construct
  misc_feature 1..22: note = Description of Artificial Sequence: Synthetic PCR primer
  source 1..22: mol_type = other DNA
aggacgacttgtgccccattca

SEQ ID NO: 874 - DNA, 20 bp, synthetic construct
  misc_feature 1..20: note = Description of Artificial Sequence: Synthetic PCR primer
  source 1..20: mol_type = other DNA
tccacccacccacccatcct

SEQ ID NO: 875 - DNA, 21 bp, synthetic construct
  misc_feature 1..21: note = Description of Artificial Sequence: Synthetic PCR primer
  source 1..21: mol_type = other DNA
gccccctcaccacatgatgct

SEQ ID NO: 876 - DNA, 20 bp, synthetic construct
  misc_feature 1..20: note = Description of Artificial Sequence: Synthetic PCR primer
  source 1..20: mol_type = other DNA
tggggatccttgctcatggc

SEQ ID NO: 877 - DNA, 20 bp, synthetic construct
  misc_feature 1..20: note = Description of Artificial Sequence: Synthetic PCR primer
  source 1..20: mol_type = other DNA
cctgcacgaggccaggtgtt

SEQ ID NO: 878 - DNA, 20 bp, synthetic construct
  misc_feature 1..20: note = Description of Artificial Sequence: Synthetic PCR primer
  source 1..20: mol_type = other DNA
ctcgccgccgtgactgtagg

SEQ ID NO: 879 - DNA, 22 bp, synthetic construct
  misc_feature 1..22: note = Description of Artificial Sequence: Synthetic PCR primer
  source 1..22: mol_type = other DNA
agagcactgggtagcagtcagt

SEQ ID NO: 880 - DNA, 20 bp, synthetic construct
  misc_feature 1..20: note = Description of Artificial Sequence: Synthetic PCR primer
  source 1..20: mol_type = other DNA
ggtgggcgtgtgtgtgtacc

SEQ ID NO: 881 - DNA, 20 bp, synthetic construct
  misc_feature 1..20: note = Description of Artificial Sequence: Synthetic PCR primer
  source 1..20: mol_type = other DNA
gagaagtcagggctggcggg

SEQ ID NO: 882 - DNA, 20 bp, synthetic construct
  misc_feature 1..20: note = Description of Artificial Sequence: Synthetic PCR primer
  source 1..20: mol_type = other DNA
tggtgagggcttcagggagc

SEQ ID NO: 883 - DNA, 20 bp, synthetic construct
  misc_feature 1..20: note = Description of Artificial Sequence: Synthetic PCR primer
  source 1..20: mol_type = other DNA
tccttctacacatcggcggc

SEQ ID NO: 884 - DNA, 20 bp, synthetic construct
  misc_feature 1..20: note = Description of Artificial Sequence: Synthetic PCR primer
  source 1..20: mol_type = other DNA
ctgacctggggctctggtac

SEQ ID NO: 885 - DNA, 21 bp, synthetic construct
  misc_feature 1..21: note = Description of Artificial Sequence: Synthetic PCR primer
  source 1..21: mol_type = other DNA
gcactgagcaaccaggagcac

SEQ ID NO: 886 - DNA, 20 bp, synthetic construct
  misc_feature 1..20: note = Description of Artificial Sequence: Synthetic PCR primer
  source 1..20: mol_type = other DNA
gctcccctgccaggtgaacc

SEQ ID NO: 887 - DNA, 20 bp, synthetic construct
  misc_feature 1..20: note = Description of Artificial Sequence: Synthetic PCR primer
  source 1..20: mol_type = other DNA
ctgcggagtggctggctata

SEQ ID NO: 888 - DNA, 20 bp, synthetic construct
  misc_feature 1..20: note = Description of Artificial Sequence: Synthetic PCR primer
  source 1..20: mol_type = other DNA
ggagcagctcttccagggcc

SEQ ID NO: 889 - DNA, 20 bp, synthetic construct
  misc_feature 1..20: note = Description of Artificial Sequence: Synthetic PCR primer
  source 1..20: mol_type = other DNA
ctggcagcctctggatgggg

SEQ ID NO: 890 - DNA, 20 bp, synthetic construct
  misc_feature 1..20: note = Description of Artificial Sequence: Synthetic PCR primer
  source 1..20: mol_type = other DNA
aggccgcggtgttatggtta

SEQ ID NO: 891 - DNA, 25 bp, synthetic construct
  misc_feature 1..25: note = Description of Artificial Sequence: Synthetic PCR primer
  source 1..25: mol_type = other DNA
tgacatattttcctgggccatgggt

SEQ ID NO: 892 - DNA, 27 bp, synthetic construct
  misc_feature 1..27: note = Description of Artificial Sequence: Synthetic PCR primer
  source 1..27: mol_type = other DNA
ccatgctgacatcatatactgggaagc

SEQ ID NO: 893 - DNA, 20 bp, synthetic construct
  misc_feature 1..20: note = Description of Artificial Sequence: Synthetic PCR primer
  source 1..20: mol_type = other DNA
ccaggctgggcacacaggtt

SEQ ID NO: 894 - DNA, 26 bp, synthetic construct
  misc_feature 1..26: note = Description of Artificial Sequence: Synthetic PCR primer
  source 1..26: mol_type = other DNA
aggatgagttcatgtcctttgtgggg

SEQ ID NO: 895 - DNA, 27 bp, synthetic construct
  misc_feature 1..27: note = Description of Artificial Sequence: Synthetic PCR primer
  source 1..27: mol_type = other DNA
aatgactcattccctgggtatctccca

SEQ ID NO: 896 - DNA, 20 bp, synthetic construct
  misc_feature 1..20: note = Description of Artificial Sequence: Synthetic PCR primer
  source 1..20: mol_type = other DNA
caaggtcggcagggcagtga

SEQ ID NO: 897 - DNA, 24 bp, synthetic construct
  misc_feature 1..24: note = Description of Artificial Sequence: Synthetic PCR primer
  source 1..24: mol_type = other DNA
tgagagttcctgttgctccacact

SEQ ID NO: 898 - DNA, 20 bp, synthetic construct
  misc_feature 1..20: note = Description of Artificial Sequence: Synthetic PCR primer
  source 1..20: mol_type = other DNA
acatgcatctgtgtgtgcgt

SEQ ID NO: 899 - DNA, 27 bp, synthetic construct
  misc_feature 1..27: note = Description of Artificial Sequence: Synthetic PCR primer
  source 1..27: mol_type = other DNA
tgtatctttcttgccaatggttttccc

SEQ ID NO: 900 - DNA, 23 bp, synthetic construct
  misc_feature 1..23: note = Description of Artificial Sequence: Synthetic PCR primer
  source 1..23: mol_type = other DNA
tcctggagagcaggcatttttgt

SEQ ID NO: 901 - DNA, 20 bp, synthetic construct
  misc_feature 1..20: note = Description of Artificial Sequence: Synthetic PCR primer
  source 1..20: mol_type = other DNA
ggcgggaaggtaaccctggg

SEQ ID NO: 902 - DNA, 23 bp, synthetic construct
  misc_feature 1..23: note = Description of Artificial Sequence: Synthetic PCR primer
  source 1..23: mol_type = other DNA
tgatccgatggttgttcacagct

SEQ ID NO: 903 - DNA, 22 bp, synthetic construct
  misc_feature 1..22: note = Description of Artificial Sequence: Synthetic PCR primer
  source 1..22: mol_type = other DNA
acgcacaaaaatgcccttgtca

SEQ ID NO: 904 - DNA, 20 bp, synthetic construct
  misc_feature 1..20: note = Description of Artificial Sequence: Synthetic PCR primer
  source 1..20: mol_type = other DNA
gcccgagcacagtgtagggc

SEQ ID NO: 905 - DNA, 23 bp, synthetic construct
  misc_feature 1..23: note = Description of Artificial Sequence: Synthetic PCR primer
  source 1..23: mol_type = other DNA
actgcatctcatctcaggcagct

SEQ ID NO: 906 - DNA, 27 bp, synthetic construct
  misc_feature 1..27: note = Description of Artificial Sequence: Synthetic PCR primer
  source 1..27: mol_type = other DNA
tcagcttcacatctgtttcagttcagt

SEQ ID NO: 907 - DNA, 21 bp, synthetic construct
  misc_feature 1..21: note = Description of Artificial Sequence: Synthetic PCR primer
  source 1..21: mol_type = other DNA
agagcagaaagagagtgccca

SEQ ID NO: 908 - DNA, 23 bp, synthetic construct
  misc_feature 1..23: note = Description of Artificial Sequence: Synthetic PCR primer
  source 1..23: mol_type = other DNA
tgcacaagccacttagcctctct

SEQ ID NO: 909 - DNA, 21 bp, synthetic construct
  misc_feature 1..21: note = Description of Artificial Sequence: Synthetic PCR primer
  source 1..21: mol_type = other DNA
tctctcgccccgtttccttgt

SEQ ID NO: 910 - DNA, 20 bp, synthetic construct
  misc_feature 1..20: note = Description of Artificial Sequence: Synthetic PCR primer
  source 1..20: mol_type = other DNA
acagcaggaaggagccgcag

SEQ ID NO: 911 - DNA, 20 bp, synthetic construct
  misc_feature 1..20: note = Description of Artificial Sequence: Synthetic PCR primer
  source 1..20: mol_type = other DNA
aggaggtctcgagccagggg

SEQ ID NO: 912 - DNA, 27 bp, synthetic construct
  misc_feature 1..27: note = Description of Artificial Sequence: Synthetic PCR primer
  source 1..27: mol_type = other DNA
gtctatatacagcccacaacctcatgt

SEQ ID NO: 913 - DNA, 26 bp, synthetic construct
  misc_feature 1..26: note = Description of Artificial Sequence: Synthetic PCR primer
  source 1..26: mol_type = other DNA
tgtcatttcttagtatgtcagccgga

SEQ ID NO: 914 - DNA, 20 bp, synthetic construct
  misc_feature 1..20: note = Description of Artificial Sequence: Synthetic PCR primer
  source 1..20: mol_type = other DNA
gccagagctacccactcgcc

SEQ ID NO: 915 - DNA, 20 bp, synthetic construct
  misc_feature 1..20: note = Description of Artificial Sequence: Synthetic PCR primer
  source 1..20: mol_type = other DNA
gggaagggggacactgggga

SEQ ID NO: 916 - DNA, 27 bp, synthetic construct
  misc_feature 1..27: note = Description of Artificial Sequence: Synthetic PCR primer
  source 1..27: mol_type = other DNA
atctgcacatgtatgtacaggagtcat

SEQ ID NO: 917 - DNA, 24 bp, synthetic construct
  misc_feature 1..24: note = Description of Artificial Sequence: Synthetic PCR primer
  source 1..24: mol_type = other DNA
agggtgtactgtgggaactttgca

SEQ ID NO: 918 - DNA, 26 bp, synthetic construct
  misc_feature 1..26: note = Description of Artificial Sequence: Synthetic PCR primer
  source 1..26: mol_type = other DNA
acttcgtagagccttaaacatgtggc

SEQ ID NO: 919 - DNA, 23 bp, synthetic construct
  misc_feature 1..23: note = Description of Artificial Sequence: Synthetic PCR primer
  source 1..23: mol_type = other DNA
tcaaacaaggtgcagatacagca

SEQ ID NO: 920 - DNA, 26 bp, synthetic construct
  misc_feature 1..26: note = Description of Artificial Sequence: Synthetic PCR primer
  source 1..26: mol_type = other DNA
tgctctgtggatcatattttggggga

SEQ ID NO: 921 - DNA, 21 bp, synthetic construct
  misc_feature 1..21: note = Description of Artificial Sequence: Synthetic PCR primer
  source 1..21: mol_type = other DNA
cccacgctgaagtgcaatggc

SEQ ID NO: 922 - DNA, 20 bp, synthetic construct
  misc_feature 1..20: note = Description of Artificial Sequence: Synthetic PCR primer
  source 1..20: mol_type = other DNA
ggctcttcgatttggcacct

SEQ ID NO: 923 - DNA, 20 bp, synthetic construct
  misc_feature 1..20: note = Description of Artificial Sequence: Synthetic PCR primer
  source 1..20: mol_type = other DNA
aggaacacaggccaggctgg

SEQ ID NO: 924 - DNA, 20 bp, synthetic construct
  misc_feature 1..20: note = Description of Artificial Sequence: Synthetic PCR primer
  source 1..20: mol_type = other DNA
ccgaccttcatccctcctgg

SEQ ID NO: 925 - DNA, 21 bp, synthetic construct
  misc_feature 1..21: note = Description of Artificial Sequence: Synthetic PCR primer
  source 1..21: mol_type = other DNA
tgggctctgtgtccctaccca

SEQ ID NO: 926 - DNA, 23 bp, synthetic construct
  misc_feature 1..23: note = Description of Artificial Sequence: Synthetic PCR primer
  source 1..23: mol_type = other DNA
accctgactactgactgaccgct

SEQ ID NO: 927 - DNA, 23 bp, synthetic construct
  misc_feature 1..23: note = Description of Artificial Sequence: Synthetic PCR primer
  source 1..23: mol_type = other DNA
agaggcattgacttggagcacct

SEQ ID NO: 928 - DNA, 20 bp, synthetic construct
  misc_feature 1..20: note = Description of Artificial Sequence: Synthetic PCR primer
  source 1..20: mol_type = other DNA
cctcagggagggggcctgat

SEQ ID NO: 929 - DNA, 22 bp, synthetic construct
  misc_feature 1..22: note = Description of Artificial Sequence: Synthetic PCR primer
  source 1..22: mol_type = other DNA
aggtcggtgcagggtttaagga

SEQ ID NO: 930 - DNA, 21 bp, synthetic construct
  misc_feature 1..21: note = Description of Artificial Sequence: Synthetic PCR primer
  source 1..21: mol_type = other DNA
cgtcacccatcgtctcgtgga

SEQ ID NO: 931 - DNA, 27 bp, synthetic construct
  misc_feature 1..27: note = Description of Artificial Sequence: Synthetic PCR primer
  source 1..27: mol_type = other DNA
gcatcttgctaaccgtacttcttctga

SEQ ID NO: 932 - DNA, 22 bp, synthetic construct
  misc_feature 1..22: note = Description of Artificial Sequence: Synthetic PCR primer
  source 1..22: mol_type = other DNA
gctcctggcctcttcctacagc

SEQ ID NO: 933 - DNA, 23 bp, synthetic construct
  misc_feature 1..23: note = Description of Artificial Sequence: Synthetic PCR primer
  source 1..23: mol_type = other DNA
ccaagtcaatgggcaacaaggga

SEQ ID NO: 934 - DNA, 20 bp, synthetic construct
  misc_feature 1..20: note = Description of Artificial Sequence: Synthetic PCR primer
  source 1..20: mol_type = other DNA
atggcaggcagaggaggaag

SEQ ID NO: 935 - DNA, 20 bp, synthetic construct
  misc_feature 1..20: note = Description of Artificial Sequence: Synthetic PCR primer
  source 1..20: mol_type = other DNA
ctggggccagggtttctgcc

SEQ ID NO: 936 - DNA, 24 bp, synthetic construct
  misc_feature 1..24: note = Description of Artificial Sequence: Synthetic PCR primer
  source 1..24: mol_type = other DNA
tccttctgtaggcaatgggaacaa

SEQ ID NO: 937 - DNA, 20 bp, synthetic construct
  misc_feature 1..20: note = Description of Artificial Sequence: Synthetic PCR primer
  source 1..20: mol_type = other DNA
ggcagatttcccccatgctg

SEQ ID NO: 938 - DNA, 20 bp, synthetic construct
  misc_feature 1..20: note = Description of Artificial Sequence: Synthetic PCR primer
  source 1..20: mol_type = other DNA
aaggggagtgtgcaagcctc

SEQ ID NO: 939 - DNA, 24 bp, synthetic construct
  misc_feature 1..24: note = Description of Artificial Sequence: Synthetic PCR primer
  source 1..24: mol_type = other DNA
agtccaacactcaggtgagaccct

SEQ ID NO: 940 - DNA, 27 bp, synthetic construct
  misc_feature 1..27: note = Description of Artificial Sequence: Synthetic PCR primer
  source 1..27: mol_type = other DNA
gggtatggaattctggattagcagagc

SEQ ID NO: 941 - DNA, 22 bp, synthetic construct
  misc_feature 1..22: note = Description of Artificial Sequence: Synthetic PCR primer
  source 1..22: mol_type = other DNA
acactgtgagtatgcttggcgt

SEQ ID NO: 942 - DNA, 22 bp, synthetic construct
  misc_feature 1..22: note = Description of Artificial Sequence: Synthetic PCR primer
  source 1..22: mol_type = other DNA
tcggatgcttttccacagggct

SEQ ID NO: 943 - DNA, 24 bp, synthetic construct
  misc_feature 1..24: note = Description of Artificial Sequence: Synthetic PCR primer
  source 1..24: mol_type = other DNA
ccaatcctgagctcctacaaggct

SEQ ID NO: 944 - DNA, 23 bp, synthetic construct
  misc_feature 1..23: note = Description of Artificial Sequence: Synthetic PCR primer
  source 1..23: mol_type = other DNA
tgctggttaaggggtgttttgga

SEQ ID NO: 945 - DNA, 24 bp, synthetic construct
  misc_feature 1..24: note = Description of Artificial Sequence: Synthetic PCR primer
  source 1..24: mol_type = other DNA
tgggggacaatggaaaagcaatga

SEQ ID NO: 946 - DNA, 20 bp, synthetic construct
  misc_feature 1..20: note = Description of Artificial Sequence: Synthetic PCR primer
  source 1..20: mol_type = other DNA
agcccttgccatgcaggacc

SEQ ID NO: 947 - DNA, 24 bp, synthetic construct
  misc_feature 1..24: note = Description of Artificial Sequence: Synthetic PCR primer
  source 1..24: mol_type = other DNA
aaccacagatgtaccctcaaagct

SEQ ID NO: 948 - DNA, 20 bp, synthetic construct
  misc_feature 1..20: note = Description of Artificial Sequence: Synthetic PCR primer
  source 1..20: mol_type = other DNA
tctggaacctgggaggcgga

SEQ ID NO: 949 - DNA, 20 bp, synthetic construct
  misc_feature 1..20: note = Description of Artificial Sequence: Synthetic PCR primer
  source 1..20: mol_type = other DNA
cctccttgggcctggggttc

SEQ ID NO: 950 - DNA, 21 bp, synthetic construct
  misc_feature 1..21: note = Description of Artificial Sequence: Synthetic PCR primer
  source 1..21: mol_type = other DNA
agatgttctgtccccaggcct

SEQ ID NO: 951 - DNA, 20 bp, synthetic construct
  misc_feature 1..20: note = Description of Artificial Sequence: Synthetic PCR primer
  source 1..20: mol_type = other DNA
tgccgctccacataccctcc

SEQ ID NO: 952 - DNA, 25 bp, synthetic construct
  misc_feature 1..25: note = Description of Artificial Sequence: Synthetic PCR primer
  source 1..25: mol_type = other DNA
agcacctattggacactggttctct

SEQ ID NO: 953 - DNA, 21 bp, synthetic construct
  misc_feature 1..21: note = Description of Artificial Sequence: Synthetic PCR primer
  source 1..21: mol_type = other DNA
tggagatggagcctggtggga

SEQ ID NO: 954 - DNA, 20 bp, synthetic construct
  misc_feature 1..20: note = Description of Artificial Sequence: Synthetic PCR primer
  source 1..20: mol_type = other DNA
cccacagaaacctgggccct

SEQ ID NO: 955 - DNA, 21 bp, synthetic construct
  misc_feature 1..21: note = Description of Artificial Sequence: Synthetic PCR primer
  source 1..21: mol_type = other DNA
tgggtcctctccacctctgca

SEQ ID NO: 956 - DNA, 22 bp, synthetic construct
  misc_feature 1..22: note = Description of Artificial Sequence: Synthetic PCR primer
  source 1..22: mol_type = other DNA
cagaatcttgctctgttgccca

SEQ ID NO: 957 - DNA, 26 bp, synthetic construct
  misc_feature 1..26: note = Description of Artificial Sequence: Synthetic PCR primer
  source 1..26: mol_type = other DNA
tcccaagagaaaactctgtcctgaca

SEQ ID NO: 958 - DNA, 20 bp, synthetic construct
  misc_feature 1..20: note = Description of Artificial Sequence: Synthetic PCR primer
  source 1..20: mol_type = other DNA
tggctgtgctgggctgtgtt

SEQ ID NO: 959 - DNA, 21 bp, synthetic construct
  misc_feature 1..21: note = Description of Artificial Sequence: Synthetic PCR primer
  source 1..21: mol_type = other DNA
acaggtgccaaaacactgcct

SEQ ID NO: 960 - DNA, 20 bp, synthetic construct
  misc_feature 1..20: note = Description of Artificial Sequence: Synthetic PCR primer
  source 1..20: mol_type = other DNA
cgatcagtcccctggcgtcc

SEQ ID NO: 961 - DNA, 21 bp, synthetic construct
  misc_feature 1..21: note = Description of Artificial Sequence: Synthetic PCR primer
  source 1..21: mol_type = other DNA
aggggtttccaggcacatggg

SEQ ID NO: 962 - skipped

SEQ ID NO: 963 - DNA, 30 bp, synthetic construct
  misc_feature 1..30: note = Description of Artificial Sequence: Synthetic PCR primer
  source 1..30: mol_type = other DNA
aaagtgttagccaacatacagaagtcagga

SEQ ID NO: 964 - DNA, 27 bp, synthetic construct
  misc_feature 1..27: note = Description of Artificial Sequence: Synthetic PCR primer
  source 1..27: mol_type = other DNA
tgtctgagtatctaggctaaaagtggt

SEQ ID NO: 965 - DNA, 27 bp, synthetic construct
  misc_feature 1..27: note = Description of Artificial Sequence: Synthetic PCR primer
  source 1..27: mol_type = other DNA
agtgctttgtgaactgaaaagcaaaca

SEQ ID NO: 966 - DNA, 24 bp, synthetic construct
  misc_feature 1..24: note = Description of Artificial Sequence: Synthetic PCR primer
  source 1..24: mol_type = other DNA
gggcaactgaacaggcatgaatgg

SEQ ID NO: 967 - DNA, 20 bp, synthetic construct
  misc_feature 1..20: note = Description of Artificial Sequence: Synthetic PCR primer
  source 1..20: mol_type = other DNA
ggtgcacctggatccaccca

SEQ ID NO: 968 - DNA, 20 bp, synthetic construct
  misc_feature 1..20: note = Description of Artificial Sequence: Synthetic PCR primer
  source 1..20: mol_type = other DNA
accactgctgcaggctccag

SEQ ID NO: 969 - DNA, 20 bp, synthetic construct
  misc_feature 1..20: note = Description of Artificial Sequence: Synthetic PCR primer
  source 1..20: mol_type = other DNA
tggtgcgtggtgtgtgtggt

SEQ ID NO: 970 - DNA, 22 bp, synthetic construct
  misc_feature 1..22: note = Description of Artificial Sequence: Synthetic PCR primer
  source 1..22: mol_type = other DNA
ccatgtgactactgggctgccc

SEQ ID NO: 971 - DNA, 27 bp, synthetic construct
  misc_feature 1..27: note = Description of Artificial Sequence: Synthetic PCR primer
  source 1..27: mol_type = other DNA
ggttctctctctcagaaaagaaagagg

SEQ ID NO: 972 - DNA, 21 bp, synthetic construct
  misc_feature 1..21: note = Description of Artificial Sequence: Synthetic PCR primer
  source 1..21: mol_type = other DNA
gccagaggctctcagcagtgc

SEQ ID NO: 973 - DNA, 20 bp, synthetic construct
  misc_feature 1..20: note = Description of Artificial Sequence: Synthetic PCR primer
  source 1..20: mol_type = other DNA
actgtgcccagccccatatt

SEQ ID NO: 974 - DNA, 20 bp, synthetic construct
  misc_feature 1..20: note = Description of Artificial Sequence: Synthetic PCR primer
  source 1..20: mol_type = other DNA
cgggttgtggcaccgggtta

SEQ ID NO: 975 - DNA, 27 bp, synthetic construct
  misc_feature 1..27: note = Description of Artificial Sequence: Synthetic PCR primer
  source 1..27: mol_type = other DNA
agagttcaggcatgaaaagaagcaaca

SEQ ID NO: 976 - DNA, 23 bp, synthetic construct
  misc_feature 1..23: note = Description of Artificial Sequence: Synthetic PCR primer
  source 1..23: mol_type = other DNA
tgcaatttgaggggctctcttca

SEQ ID NO: 977 - DNA, 25 bp, synthetic construct
  misc_feature 1..25: note = Description of Artificial Sequence: Synthetic PCR primer
  source 1..25: mol_type = other DNA
tgccagccaaaagttgttagtgtgt

SEQ ID NO: 978 - DNA, 24 bp, synthetic construct
  misc_feature 1..24: note = Description of Artificial Sequence: Synthetic PCR primer
  source 1..24: mol_type = other DNA
tgtgtggtagggagcaaaacgaca

SEQ ID NO: 979 - DNA, 20 bp, synthetic construct
  misc_feature 1..20: note = Description of Artificial Sequence: Synthetic PCR primer
  source 1..20: mol_type = other DNA
tgaccacacacacccccacg

SEQ ID NO: 980 - DNA, 24 bp, synthetic construct
  misc_feature 1..24: note = Description of Artificial Sequence: Synthetic PCR primer
  source 1..24: mol_type = other DNA
tgtgtttttaagctgcaccccagg

SEQ ID NO: 981 - DNA, 20 bp, synthetic construct
  misc_feature 1..20: note = Description of Artificial Sequence: Synthetic PCR primer
  source 1..20: mol_type = other DNA
gcacgcagctgactcccaga

SEQ ID NO: 982 - DNA, 20 bp, synthetic construct
  misc_feature 1..20: note = Description of Artificial Sequence: Synthetic PCR primer
  source 1..20: mol_type = other DNA
accagggctgccacagagtc

SEQ ID NO: 983 - DNA, 20 bp, synthetic construct
  misc_feature 1..20: note = Description of Artificial Sequence: Synthetic PCR primer
  source 1..20: mol_type = other DNA
ctcggcccctgagagttcat

SEQ ID NO: 984 - DNA, 20 bp, synthetic construct
  misc_feature 1..20: note = Description of Artificial Sequence: Synthetic PCR primer
  source 1..20: mol_type = other DNA
gagcagcagcaaagccaccg

SEQ ID NO: 985 - DNA, 20 bp, synthetic construct
  misc_feature 1..20: note = Description of Artificial Sequence: Synthetic PCR primer
  source 1..20: mol_type = other DNA
agccgagacaatctgccccg

SEQ ID NO: 986 - DNA, 20 bp, synthetic construct
  misc_feature 1..20: note = Description of Artificial Sequence: Synthetic PCR primer
  source 1..20: mol_type = other DNA
ggcaggtctgaccagtgggg

SEQ ID NO: 987 - DNA, 27 bp, synthetic construct
  misc_feature 1..27: note = Description of Artificial Sequence: Synthetic PCR primer
  source 1..27: mol_type = other DNA
tgagtagacagaaatgttaccggtgtt

SEQ ID NO: 988 - DNA, 22 bp, synthetic construct
  misc_feature 1..22: note = Description of Artificial Sequence: Synthetic PCR primer
  source 1..22: mol_type = other DNA
agtgaaccaagggaatggggga

SEQ ID NO: 989 - DNA, 22 bp, synthetic construct
  misc_feature 1..22: note = Description of Artificial Sequence: Synthetic PCR primer
  source 1..22: mol_type = other DNA
cacctcagccctgtagtcctgg

SEQ ID NO: 990 - DNA, 20 bp, synthetic construct
  misc_feature 1..20: note = Description of Artificial Sequence: Synthetic PCR primer
  source 1..20: mol_type = other DNA
gccactgtccccagcctatt

SEQ ID NO: 991 - DNA, 23 bp, synthetic construct
  misc_feature 1..23: note = Description of Artificial Sequence: Synthetic PCR primer
  source 1..23: mol_type = other DNA
tgagatggcatacgatttaccca

SEQ ID NO: 992 - DNA, 26 bp, synthetic construct
  misc_feature 1..26: note = Description of Artificial Sequence: Synthetic PCR primer
  source 1..26: mol_type = other DNA
tggcatcactcagagattggaacaca

SEQ ID NO: 993 - DNA, 22 bp, synthetic construct
  misc_feature 1..22: note = Description of Artificial Sequence: Synthetic PCR primer
  source 1..22: mol_type = other DNA
tcctatgggaggggaggcttct

SEQ ID NO: 994 - DNA, 22 bp, synthetic construct
  misc_feature 1..22: note = Description of Artificial Sequence: Synthetic PCR primer
  source 1..22: mol_type = other DNA
gcatacggcagtagaatgagcc

SEQ ID NO: 995 - DNA, 20 bp, synthetic construct
  misc_feature 1..20: note = Description of Artificial Sequence: Synthetic PCR primer
  source 1..20: mol_type = other DNA
ccttcctgggccccatggtg

SEQ ID NO: 996 - DNA, 24 bp, synthetic construct
  misc_feature 1..24: note = Description of Artificial Sequence: Synthetic PCR primer
  source 1..24: mol_type = other DNA
tgaaactgcttgatgaggtgtgga

SEQ ID NO: 997 - DNA, 25 bp, synthetic construct
  misc_feature 1..25: note = Description of Artificial Sequence: Synthetic PCR primer
  source 1..25: mol_type = other DNA
acttgcaaagctgataactgactga

SEQ ID NO: 998 - DNA, 20 bp, synthetic construct
  misc_feature 1..20: note = Description of Artificial Sequence: Synthetic PCR primer
  source 1..20: mol_type = other DNA
cgcagcgcacgagttcatca

SEQ ID NO: 999 - DNA, 20 bp, synthetic construct
  misc_feature 1..20: note = Description of Artificial Sequence: Synthetic PCR primer
  source 1..20: mol_type = other DNA
ggctggggaggcctcacaat

SEQ ID NO: 1000 - DNA, 20 bp, synthetic construct
  misc_feature 1..20: note = Description of Artificial Sequence: Synthetic PCR primer
  source 1..20: mol_type = other DNA
aggacaagctaccccacacc

SEQ ID NO: 1001 - DNA, 20 bp, synthetic construct
  misc_feature 1..20: note = Description of Artificial Sequence: Synthetic PCR primer
  source 1..20: mol_type = other DNA
tcattccagcacgccgggag

SEQ ID NO: 1002 - DNA, 25 bp, synthetic construct
  misc_feature 1..25: note = Description of Artificial Sequence: Synthetic PCR primer
  source 1..25: mol_type = other DNA
tggagtaagtataccttggggacct

SEQ ID NO: 1003 - DNA, 23 bp, synthetic construct
  misc_feature 1..23: note = Description of Artificial Sequence: Synthetic PCR primer
  source 1..23: mol_type = other DNA
tgtgcaaatacctagcacggtgc

SEQ ID NO: 1004 - DNA, 26 bp, synthetic construct
  misc_feature 1..26: note = Description of Artificial Sequence: Synthetic PCR primer
  source 1..26: mol_type = other DNA
actgaagtccagcctcttccatttca

SEQ ID NO: 1005 - DNA, 23 bp, synthetic construct
  misc_feature 1..23: note = Description of Artificial Sequence: Synthetic PCR primer
  source 1..23: mol_type = other DNA
ggggagtagagggtagtgttgcc

SEQ ID NO: 1006 - DNA, 20 bp, synthetic construct
  misc_feature 1..20: note = Description of Artificial Sequence: Synthetic PCR primer
  source 1..20: mol_type = other DNA
aggtgccgtgttgtgcccaa

SEQ ID NO: 1007 - skipped

SEQ ID NO: 1008 - DNA, 20 bp, synthetic construct
  misc_feature 1..20: note = Description of Artificial Sequence: Synthetic PCR primer
  source 1..20: mol_type = other DNA
gggccgggaaagagttgctg

SEQ ID NO: 1009 - DNA, 24 bp, synthetic construct
  misc_feature 1..24: note = Description of Artificial Sequence: Synthetic PCR primer
  source 1..24: mol_type = other DNA
acctctctttctctgcctcactgt

SEQ ID NO: 1010 - DNA, 20 bp, synthetic construct
  misc_feature 1..20: note = Description of Artificial Sequence: Synthetic PCR primer
  source 1..20: mol_type = other DNA
gcagtacggaagcacgaagc

SEQ ID NO: 1011 - DNA, 20 bp, synthetic construct
  misc_feature 1..20: note = Description of Artificial Sequence: Synthetic PCR primer
  source 1..20: mol_type = other DNA
ctgggctctgctggttcccc

SEQ ID NO: 1012 - DNA, 21 bp, synthetic construct
  misc_feature 1..21: note = Description of Artificial Sequence: Synthetic PCR primer
  source 1..21: mol_type = other DNA
ccccataccacctctccggga

SEQ ID NO: 1013 - DNA, 20 bp, synthetic construct
  misc_feature 1..20: note = Description of Artificial Sequence: Synthetic PCR primer
  source 1..20: mol_type = other DNA
ccagcgtgtttccaagggat

SEQ ID NO: 1014 - DNA, 23 bp, synthetic construct
  misc_feature 1..23: note = Description of Artificial Sequence: Synthetic PCR primer
  source 1..23: mol_type = other DNA
tttccacactcagttctgcagga

SEQ ID NO: 1015 - DNA, 23 bp, synthetic construct
  misc_feature 1..23: note = Description of Artificial Sequence: Synthetic PCR primer
  source 1..23: mol_type = other DNA
gcagtgttttgtggtgatgggca

SEQ ID NO: 1016 - DNA, 20 bp, synthetic construct
  misc_feature 1..20: note = Description of Artificial Sequence: Synthetic PCR primer
  source 1..20: mol_type = other DNA
tgggaccccagcagccaatg

SEQ ID NO: 1017 - DNA, 20 bp, synthetic construct
  misc_feature 1..20: note = Description of Artificial Sequence: Synthetic PCR primer
  source 1..20: mol_type = other DNA
acagtgctgaccgtgctggg

SEQ ID NO: 1018 - DNA, 24 bp, synthetic construct
  misc_feature 1..24: note = Description of Artificial Sequence: Synthetic PCR primer
  source 1..24: mol_type = other DNA
tgcctcccacaaaaatgtctacct

SEQ ID NO: 1019 - DNA, 23 bp, synthetic construct
  misc_feature 1..23: note = Description of Artificial Sequence: Synthetic PCR primer
  source 1..23: mol_type = other DNA
accccttatcccagaacccatga

SEQ ID NO: 1020 - DNA, 23 bp, synthetic construct
  misc_feature 1..23: note = Description of Artificial Sequence: Synthetic PCR primer
  source 1..23: mol_type = other DNA
tgggagctgttcctttttggcca

SEQ ID NO: 1021 - DNA, 20 bp, synthetic construct
  misc_feature 1..20: note = Description of Artificial Sequence: Synthetic PCR primer
  source 1..20: mol_type = other DNA
gctagagggtctgctgcctt

SEQ ID NO: 1022 - DNA, 20 bp, synthetic construct
  misc_feature 1..20: note = Description of Artificial Sequence: Synthetic PCR primer
  source 1..20: mol_type = other DNA
cttgctctcaccccgcctcc

SEQ ID NO: 1023 - DNA, 25 bp, synthetic construct
  misc_feature 1..25: note = Description of Artificial Sequence: Synthetic PCR primer
  source 1..25: mol_type = other DNA
tctcactttgctgttaccgatgtcg

SEQ ID NO: 1024 - DNA, 24 bp, synthetic construct
  misc_feature 1..24: note = Description of Artificial Sequence: Synthetic PCR primer
  source 1..24: mol_type = other DNA
agtgcccagagtgttgtaactgct

SEQ ID NO: 1025 - DNA, 20 bp, synthetic construct
  misc_feature 1..20: note = Description of Artificial Sequence: Synthetic PCR primer
  source 1..20: mol_type = other DNA
cagcgtggcccgtgggaata

SEQ ID NO: 1026 - DNA, 25 bp, synthetic construct
  misc_feature 1..25: note = Description of Artificial Sequence: Synthetic PCR primer
  source 1..25: mol_type = other DNA
accccactgtggatgaattggtacc

SEQ ID NO: 1027 - DNA, 20 bp, synthetic construct
  misc_feature 1..20: note = Description of Artificial Sequence: Synthetic PCR primer
  source 1..20: mol_type = other DNA
ttgcctcgcaggggaagcag

SEQ ID NO: 1028 - DNA, 22 bp, synthetic construct
  misc_feature 1..22: note = Description of Artificial Sequence: Synthetic PCR primer
  source 1..22: mol_type = other DNA
agccaccaacacataccaggct

SEQ ID NO: 1029 - DNA, 22 bp, synthetic construct
  misc_feature 1..22: note = Description of Artificial Sequence: Synthetic PCR primer
  source 1..22: mol_type = other DNA
aggatttcagagtgatggggct

SEQ ID NO: 1030 - DNA, 27 bp, synthetic construct
  misc_feature 1..27: note = Description of Artificial Sequence: Synthetic PCR primer
  source 1..27: mol_type = other DNA
gcaaatttctgcacctactctaggcct

SEQ ID NO: 1031 - DNA, 22 bp, synthetic construct
  misc_feature 1..22: note = Description of Artificial Sequence: Synthetic PCR primer
  source 1..22: mol_type = other DNA
gcagtcacccttcactgcctgt

SEQ ID NO: 1032 - DNA, 23 bp, synthetic construct
  misc_feature 1..23: note = Description of Artificial Sequence: Synthetic PCR primer
  source 1..23: mol_type = other DNA
ggggctaaggcattgtcagaccc

SEQ ID NO: 1033 - DNA, 20 bp, synthetic construct
  misc_feature 1..20: note = Description of Artificial Sequence: Synthetic PCR primer
  source 1..20: mol_type = other DNA
tctcctgcctcagcctccca

SEQ ID NO: 1034 - DNA, 20 bp, synthetic construct
  misc_feature 1..20: note = Description of Artificial Sequence: Synthetic PCR primer
  source 1..20: mol_type = other DNA
tctcctgcctcagcctccca

SEQ ID NO: 1035 - DNA, 20 bp, synthetic construct
  misc_feature 1..20: note = Description of Artificial Sequence: Synthetic PCR primer
  source 1..20: mol_type = other DNA
tctcctgcctcagcctccca

SEQ ID NO: 1036 - DNA, 20 bp, synthetic construct
  misc_feature 1..20: note = Description of Artificial Sequence: Synthetic PCR primer
  source 1..20: mol_type = other DNA
ggcctgtcaaccaaccaacc

SEQ ID NO: 1037 - DNA, 20 bp, synthetic construct
  misc_feature 1..20: note = Description of Artificial Sequence: Synthetic PCR primer
  source 1..20: mol_type = other DNA
aaatcctgcagcctcccctt

SEQ ID NO: 1038 - DNA, 20 bp, synthetic construct
  misc_feature 1..20: note = Description of Artificial Sequence: Synthetic PCR primer
  source 1..20: mol_type = other DNA
tcctccccactcagcctccc

SEQ ID NO: 1039 - DNA, 22 bp, synthetic construct
  misc_feature 1..22: note = Description of Artificial Sequence: Synthetic PCR primer
  source 1..22: mol_type = other DNA
agggaccagccactacccttca

SEQ ID NO: 1040 - DNA, 20 bp, synthetic construct
  misc_feature 1..20: note = Description of Artificial Sequence: Synthetic PCR primer
  source 1..20: mol_type = other DNA
gggggagattggagttcccc

SEQ ID NO: 1041 - DNA, 20 bp, synthetic construct
  misc_feature 1..20: note = Description of Artificial Sequence: Synthetic PCR primer
  source 1..20: mol_type = other DNA
tctgcctggggtgctttccc

SEQ ID NO: 1042 - DNA, 20 bp, synthetic construct
  misc_feature 1..20: note = Description of Artificial Sequence: Synthetic PCR primer
  source 1..20: mol_type = other DNA
gccccgacagatgaggcctc

SEQ ID NO: 1043 - DNA, 20 bp, synthetic construct
  misc_feature 1..20: note = Description of Artificial Sequence: Synthetic PCR primer
  source 1..20: mol_type = other DNA
acccaggaattgccaccccc

SEQ ID NO: 1044 - DNA, 20 bp, synthetic construct
  misc_feature 1..20: note = Description of Artificial Sequence: Synthetic PCR primer
  source 1..20: mol_type = other DNA
gcagacactagagcccgccc

SEQ ID NO: 1045 - DNA, 20 bp, synthetic construct
  misc_feature 1..20: note = Description of Artificial Sequence: Synthetic PCR primer
  source 1..20: mol_type = other DNA
acctgcgtctctgtgctgca

SEQ ID NO: 1046 - DNA, 19 bp, synthetic construct
  misc_feature 1..19: note = Description of Artificial Sequence: Synthetic PCR primer
  source 1..19: mol_type = other DNA
cctggccccatgctgcctg

SEQ ID NO: 1047 - DNA, 24 bp, synthetic construct
  misc_feature 1..24: note = Description of Artificial Sequence: Synthetic PCR primer
  source 1..24: mol_type = other DNA
agggaatgatgttttccaccccct

SEQ ID NO: 1048 - DNA, 22 bp, synthetic construct
  misc_feature 1..22: note = Description of Artificial Sequence: Synthetic PCR primer
  source 1..22: mol_type = other DNA
tgcattgacgtacgatggctca

SEQ ID NO: 1049 - DNA, 24 bp, synthetic construct
  misc_feature 1..24: note = Description of Artificial Sequence: Synthetic PCR primer
  source 1..24: mol_type = other DNA
acctgagcaacatgactcacctgg

SEQ ID NO: 1050 - DNA, 20 bp, synthetic construct
  misc_feature 1..20: note = Description of Artificial Sequence: Synthetic PCR primer
  source 1..20: mol_type = other DNA
accattggtgaacccagtca

SEQ ID NO: 1051 - DNA, 25 bp, synthetic construct
  misc_feature 1..25: note = Description of Artificial Sequence: Synthetic PCR primer
  source 1..25: mol_type = other DNA
tcagctataacctgggacttgtgct

SEQ ID NO: 1052 - DNA, 23 bp, synthetic construct
  misc_feature 1..23: note = Description of Artificial Sequence: Synthetic PCR primer
  source 1..23: mol_type = other DNA
ccctttcatcgagaaccccaggg

SEQ ID NO: 1053 - DNA, 20 bp, synthetic construct
  misc_feature 1..20: note = Description of Artificial Sequence: Synthetic PCR primer
  source 1..20: mol_type = other DNA
gaggtctcgggctgctcgtg

SEQ ID NO: 1054 - DNA, 21 bp, synthetic construct
  misc_feature 1..21: note = Description of Artificial Sequence: Synthetic PCR primer
  source 1..21: mol_type = other DNA
tggggtgattggttgccaggt

SEQ ID NO: 1055 - DNA, 25 bp, synthetic construct
  misc_feature 1..25: note = Description of Artificial Sequence: Synthetic PCR primer
  source 1..25: mol_type = other DNA
tgcaggaatagcaggtatgaggagt

SEQ ID NO: 1056 - DNA, 20 bp, synthetic construct
  misc_feature 1..20: note = Description of Artificial Sequence: Synthetic PCR primer
  source 1..20: mol_type = other DNA
gccctggcagcccatggtac

SEQ ID NO: 1057 - DNA, 20 bp, synthetic construct
  misc_feature 1..20: note = Description of Artificial Sequence: Synthetic PCR primer
  source 1..20: mol_type = other DNA
ggtcccaccttcccctacaa

SEQ ID NO: 1058 - DNA, 20 bp, synthetic construct
  misc_feature 1..20: note = Description of Artificial Sequence: Synthetic PCR primer
  source 1..20: mol_type = other DNA
cagcccaggccacagcttca

SEQ ID NO: 1059 - DNA, 23 bp, synthetic construct
  misc_feature 1..23: note = Description of Artificial Sequence: Synthetic VEGFA on-target sequence
  source 1..23: mol_type = other DNA
gggtggggggagtttgctcctgg

SEQ ID NO: 1060 - DNA, 23 bp, synthetic construct
  misc_feature 1..23: note = Description of Artificial Sequence: Synthetic VEGFA off-target sequence
  source 1..23: mol_type = other DNA
ggatggagggagtttgctcctgg

SEQ ID NO: 1061 - DNA, 23 bp, synthetic construct
  misc_feature 1..23: note = Description of Artificial Sequence: Synthetic VEGFA off-target sequence
  source 1..23: mol_type = other DNA
gggagggtggagtttgctcctgg

SEQ ID NO: 1062 - DNA, 23 bp, synthetic construct
  misc_feature 1..23: note = Description of Artificial Sequence: Synthetic VEGFA off-target sequence
  source 1..23: mol_type = other DNA
cgggggagggagtttgctcctgg

SEQ ID NO: 1063 - DNA, 23 bp, synthetic construct
  misc_feature 1..23: note = Description of Artificial Sequence: Synthetic VEGFA off-target sequence
  source 1..23: mol_type = other DNA
ggggaggggaagtttgctcctgg

SEQ ID NO: 1064 - DNA, 23 bp, synthetic construct
  misc_feature 1..23: note = Description of Artificial Sequence: Synthetic VEGFA on-target sequence
  source 1..23: mol_type = other DNA
gaccccctccaccccgcctccgg

SEQ ID NO: 1065 - DNA, 23 bp, synthetic construct
  misc_feature 1..23: note = Description of Artificial Sequence: Synthetic VEGFA off-target sequence
  source 1..23: mol_type = other DNA
gaccccccccaccccgcccccgg

SEQ ID NO: 1066 - DNA, 23 bp, synthetic construct
  misc_feature 1..23: note = Description of Artificial Sequence: Synthetic VEGFA off-target sequence
  source 1..23: mol_type = other DNA
gggcccctccaccccgcctctgg

SEQ ID NO: 1067 - DNA, 23 bp, synthetic construct
  misc_feature 1..23: note = Description of Artificial Sequence: Synthetic VEGFA off-target sequence
  source 1..23: mol_type = other DNA
ctacccctccaccccgcctccgg

SEQ ID NO: 1068 - DNA, 23 bp, synthetic construct
  misc_feature 1..23: note = Description of Artificial Sequence: Synthetic VEGFA off-target sequence
  source 1..23: mol_type = other DNA
gcccccacccaccccgcctctgg

SEQ ID NO: 1069 - DNA, 23 bp, synthetic construct
  misc_feature 1..23: note = Description of Artificial Sequence: Synthetic VEGFA off-target sequence
  source 1..23: mol_type = other DNA
taccccccacaccccgcctctgg

SEQ ID NO: 1070 - DNA, 23 bp, synthetic construct
  misc_feature 1..23: note = Description of Artificial Sequence: Synthetic VEGFA off-target sequence
  source 1..23: mol_type = other DNA
acacccccccaccccgcctcagg

SEQ ID NO: 1071 - DNA, 23 bp, synthetic construct
  misc_feature 1..23: note = Description of Artificial Sequence: Synthetic VEGFA off-target sequence
  source 1..23: mol_type = other DNA
attcccccccaccccgcctcagg

SEQ ID NO: 1072 - DNA, 23 bp, synthetic construct
  misc_feature 1..23: note = Description of Artificial Sequence: Synthetic VEGFA off-target sequence
  source 1..23: mol_type = other DNA
ccccacccccaccccgcctcagg

SEQ ID NO: 1073 - DNA, 23 bp, synthetic construct
  misc_feature 1..23: note = Description of Artificial Sequence: Synthetic VEGFA off-target sequence
  source 1..23: mol_type = other DNA
cgccctccccaccccgcctccgg

SEQ ID NO: 1074 - DNA, 23 bp, synthetic construct
  misc_feature 1..23: note = Description of Artificial Sequence: Synthetic VEGFA off-target sequence
  source 1..23: mol_type = other DNA
ctccccacccaccccgcctcagg

SEQ ID NO: 1075 - DNA, 23 bp, synthetic construct
  misc_feature 1..23: note = Description of Artificial Sequence: Synthetic VEGFA off-target sequence
  source 1..23: mol_type = other DNA
tgcccctcccaccccgcctctgg

SEQ ID NO: 1076 - DNA, 23 bp, synthetic construct
  misc_feature 1..23: note = Description of Artificial Sequence: Synthetic VEGFA off-target sequence
  source 1..23: mol_type = other DNA
aggcccccacaccccgcctcagg

SEQ ID NO: 1077 - DNA, 23 bp, synthetic construct
  misc_feature 1..23: note = Description of Artificial Sequence: Synthetic VEGFA on-target sequence
  source 1..23: mol_type = other DNA
ggtgagtgagtgtgtgcgtgtgg

SEQ ID NO: 1078 - DNA, 23 bp, synthetic construct
  misc_feature 1..23: note = Description of Artificial Sequence: Synthetic VEGFA off-target sequence
  source 1..23: mol_type = other DNA
ggtgagtgagtgtgtgtgtgagg

SEQ ID NO: 1079 - DNA, 23 bp, synthetic construct
  misc_feature 1..23: note = Description of Artificial Sequence: Synthetic VEGFA off-target sequence
  source 1..23: mol_type = other DNA
agtgagtgagtgtgtgtgtgggg

SEQ ID NO: 1080 - DNA, 23 bp, synthetic construct
  misc_feature 1..23: note = Description of Artificial Sequence: Synthetic VEGFA off-target sequence
  source 1..23: mol_type = other DNA
gctgagtgagtgtatgcgtgtgg

SEQ ID NO: 1081 - DNA, 23 bp, synthetic construct
  misc_feature 1..23: note = Description of Artificial Sequence: Synthetic VEGFA off-target sequence
  source 1..23: mol_type = other DNA
ggtgagtgagtgcgtgcgggtgg

SEQ ID NO: 1082 - DNA, 23 bp, synthetic construct
  misc_feature 1..23: note = Description of Artificial Sequence: Synthetic VEGFA off-target sequence
  source 1..23: mol_type = other DNA
gttgagtgaatgtgtgcgtgagg

SEQ ID NO: 1083 - DNA, 23 bp, synthetic construct
  misc_feature 1..23: note = Description of Artificial Sequence: Synthetic VEGFA off-target sequence
  source 1..23: mol_type = other DNA
tgtgggtgagtgtgtgcgtgagg

SEQ ID NO: 1084 - DNA, 23 bp, synthetic construct
  misc_feature 1..23: note = Description of Artificial Sequence: Synthetic VEGFA off-target sequence
  source 1..23: mol_type = other DNA
agagagtgagtgtgtgcatgagg

SEQ ID NO: 1085 - DNA, 23 bp, synthetic construct
  misc_feature 1..23: note = Description of Artificial Sequence: Synthetic EMX1 on-target sequence
  source 1..23: mol_type = other DNA
gagtccgagcagaagaagaaggg

SEQ ID NO: 1086 - DNA, 23 bp, synthetic construct
  misc_feature 1..23: note = Description of Artificial Sequence: Synthetic EMX1 off-target sequence
  source 1..23: mol_type = other DNA
gagttagagcagaagaagaaagg

SEQ ID NO: 1087 - DNA, 23 bp, synthetic construct
  misc_feature 1..23: note = Description of Artificial Sequence: Synthetic RNF2 on-target sequence
  source 1..23: mol_type = other DNA
gtcatcttagtcattacctgtgg

SEQ ID NO: 1088 - DNA, 23 bp, synthetic construct
  misc_feature 1..23: note = Description of Artificial Sequence: Synthetic FANCF on-target sequence
  source 1..23: mol_type = other DNA
ggaatcccttctgcagcaccagg

SEQ ID NO: 1089 - DNA, 45 bp, synthetic construct
  misc_feature 1..45: note = Description of Artificial Sequence: Synthetic PCR primer
  source 1..45: mol_type = other DNA
tggataaaaagtattctattggtttagccatcggcactaattccg

SEQ ID NO: 1090 - DNA, 45 bp, synthetic construct
  misc_feature 1..45: note = Description of Artificial Sequence: Synthetic PCR primer
  source 1..45: mol_type = other DNA
cggaattagtgccgatggctaaaccaatagaatactttttatcca

SEQ ID NO: 1091 - DNA, 24 bp, synthetic construct
  misc_feature 1..24: note = Description of Artificial Sequence: Synthetic oligonucleotide for generating gRNA expression plasmid
  source 1..24: mol_type = other DNA
acaccgcacgggcagcttgccggg

SEQ ID NO: 1092 - DNA, 24 bp, synthetic construct
  misc_feature 1..24: note = Description of Artificial Sequence: Synthetic oligonucleotide for generating gRNA expression plasmid
  source 1..24: mol_type = other DNA
acaccgcacgggcagcttgccgcg

SEQ ID NO: 1093 - DNA, 24 bp, synthetic construct
  misc_feature 1..24: note = Description of Artificial Sequence: Synthetic oligonucleotide for generating gRNA expression plasmid
  source 1..24: mol_type = other DNA
acaccgcacgggcagcttgcccgg

SEQ ID NO: 1094 - DNA, 24 bp, synthetic construct
  misc_feature 1..24: note = Description of Artificial Sequence: Synthetic oligonucleotide for generating gRNA expression plasmid
  source 1..24: mol_type = other DNA
acaccgcacgggcagcttgcgggg

SEQ ID NO: 1095 - DNA, 24 bp, synthetic construct
  misc_feature 1..24: note = Description of Artificial Sequence: Synthetic oligonucleotide for generating gRNA expression plasmid
  source 1..24: mol_type = other DNA
acaccgcacgggcagcttggcggg

SEQ ID NO: 1096 - DNA, 24 bp, synthetic construct
  misc_feature 1..24: note = Description of Artificial Sequence: Synthetic oligonucleotide for generating gRNA expression plasmid
  source 1..24: mol_type = other DNA
acaccgcacgggcagcttcccggg

SEQ ID NO: 1097 - DNA, 24 bp, synthetic construct
  misc_feature 1..24: note = Description of Artificial Sequence: Synthetic oligonucleotide for generating gRNA expression plasmid
  source 1..24: mol_type = other DNA
acaccgcacgggcagctagccggg

SEQ ID NO: 1098 - DNA, 24 bp, synthetic construct
  misc_feature 1..24: note = Description of Artificial Sequence: Synthetic oligonucleotide for generating gRNA expression plasmid
  source 1..24: mol_type = other DNA
acaccgcacgggcagcatgccggg

SEQ ID NO: 1099 - DNA, 24 bp, synthetic construct
  misc_feature 1..24: note = Description of Artificial Sequence: Synthetic oligonucleotide for generating gRNA expression plasmid
  source 1..24: mol_type = other DNA
acaccgcacgggcaggttgccggg

SEQ ID NO: 1100 - DNA, 24 bp, synthetic construct
  misc_feature 1..24: note = Description of Artificial Sequence: Synthetic oligonucleotide for generating gRNA expression plasmid
  source 1..24: mol_type = other DNA
acaccgcacgggcaccttgccggg

SEQ ID NO: 1101 - DNA, 24 bp, synthetic construct
  misc_feature 1..24: note = Description of Artificial Sequence: Synthetic oligonucleotide for generating gRNA expression plasmid
  source 1..24: mol_type = other DNA
acaccgcacgggctgcttgccggg

SEQ ID NO: 1102 - DNA, 24 bp, synthetic construct
  misc_feature 1..24: note = Description of Artificial Sequence: Synthetic oligonucleotide for generating gRNA expression plasmid
  source 1..24: mol_type = other DNA
acaccgcacggggagcttgccggg

SEQ ID NO: 1103 - DNA, 24 bp, synthetic construct
  misc_feature 1..24: note = Description of Artificial Sequence: Synthetic oligonucleotide for generating gRNA expression plasmid
  source 1..24: mol_type = other DNA
acaccgcacggccagcttgccggg

SEQ ID NO: 1104 - DNA, 24 bp, synthetic construct
  misc_feature 1..24: note = Description of Artificial Sequence: Synthetic oligonucleotide for generating gRNA expression plasmid
  source 1..24: mol_type = other DNA
acaccgcacgcgcagcttgccggg

SEQ ID NO: 1105 - DNA, 24 bp, synthetic construct
  misc_feature 1..24: note = Description of Artificial Sequence: Synthetic oligonucleotide for generating gRNA expression plasmid
  source 1..24: mol_type = other DNA
acaccgcaccggcagcttgccggg

SEQ ID NO: 1106 - DNA, 24 bp, synthetic construct
  misc_feature 1..24: note = Description of Artificial Sequence: Synthetic oligonucleotide for generating gRNA expression plasmid
  source 1..24: mol_type = other DNA
acaccgcaggggcagcttgccggg

SEQ ID NO: 1107 - DNA, 24 bp, synthetic construct
  misc_feature 1..24: note = Description of Artificial Sequence: Synthetic oligonucleotide for generating gRNA expression plasmid
  source 1..24: mol_type = other DNA
acaccgctcgggcagcttgccggg

SEQ ID NO: 1108 - DNA, 24 bp, synthetic construct
  misc_feature 1..24: note = Description of Artificial Sequence: Synthetic oligonucleotide for generating gRNA expression plasmid
  source 1..24: mol_type = other DNA
acaccggacgggcagcttgccggg

SEQ ID NO: 1109 - DNA, 24 bp, synthetic construct
  misc_feature 1..24: note = Description of Artificial Sequence: Synthetic oligonucleotide for generating gRNA expression plasmid
  source 1..24: mol_type = other DNA
acaccgcacgggcagcttgccccg

SEQ ID NO: 1110 - DNA, 24 bp, synthetic construct
  misc_feature 1..24: note = Description of Artificial Sequence: Synthetic oligonucleotide for generating gRNA expression plasmid
  source 1..24: mol_type = other DNA
acaccgcacgggcagcttgggggg

SEQ ID NO: 1111 - DNA, 24 bp, synthetic construct
  misc_feature 1..24: note = Description of Artificial Sequence: Synthetic oligonucleotide for generating gRNA expression plasmid
  source 1..24: mol_type = other DNA
acaccgcacgggcagctacccggg

SEQ ID NO: 1112 - DNA, 24 bp, synthetic construct
  misc_feature 1..24: note = Description of Artificial Sequence: Synthetic oligonucleotide for generating gRNA expression plasmid
  source 1..24: mol_type = other DNA
acaccgcacgggcaggatgccggg

SEQ ID NO: 1113 - DNA, 24 bp, synthetic construct
  misc_feature 1..24: note = Description of Artificial Sequence: Synthetic oligonucleotide for generating gRNA expression plasmid
  source 1..24: mol_type = other DNA
acaccgcacgggctccttgccggg

SEQ ID NO: 1114 - DNA, 24 bp, synthetic construct
  misc_feature 1..24: note = Description of Artificial Sequence: Synthetic oligonucleotide for generating gRNA expression plasmid
  source 1..24: mol_type = other DNA
acaccgcacggcgagcttgccggg

SEQ ID NO: 1115 - DNA, 24 bp, synthetic construct
  misc_feature 1..24: note = Description of Artificial Sequence: Synthetic oligonucleotide for generating gRNA expression plasmid
  source 1..24: mol_type = other DNA
acaccgcacccgcagcttgccggg

SEQ ID NO: 1116 - DNA, 24 bp, synthetic construct
  misc_feature 1..24: note = Description of Artificial Sequence: Synthetic oligonucleotide for generating gRNA expression plasmid
  source 1..24: mol_type = other DNA
acaccgctggggcagcttgccggg

SEQ ID NO: 1117 - DNA, 24 bp, synthetic construct
  misc_feature 1..24: note = Description of Artificial Sequence: Synthetic oligonucleotide for generating gRNA expression plasmid
  source 1..24: mol_type = other DNA
acaccggtcgggcagcttgccggg

SEQ ID NO: 1118 - DNA, 23 bp, synthetic construct
  misc_feature 1..23: note = Description of Artificial Sequence: Synthetic oligonucleotide for generating gRNA expression plasmid
  source 1..23: mol_type = other DNA
acaccgccgttcttctgcttgtg

SEQ ID NO: 1119 - DNA, 23 bp, synthetic construct
  misc_feature 1..23: note = Description of Artificial Sequence: Synthetic oligonucleotide for generating gRNA expression plasmid
  source 1..23: mol_type = other DNA
acaccgccgttcttctgcttgag

SEQ ID NO: 1120 - DNA, 23 bp, synthetic construct
  misc_feature 1..23: note = Description of Artificial Sequence: Synthetic oligonucleotide for generating gRNA expression plasmid
  source 1..23: mol_type = other DNA
acaccgccgttcttctgcttctg

SEQ ID NO: 1121 - DNA, 23 bp, synthetic construct
  misc_feature 1..23: note = Description of Artificial Sequence: Synthetic oligonucleotide for generating gRNA expression plasmid
  source 1..23: mol_type = other DNA
acaccgccgttcttctgctagtg

SEQ ID NO: 1122 - DNA, 23 bp, synthetic construct
  misc_feature 1..23: note = Description of Artificial Sequence: Synthetic oligonucleotide for generating gRNA expression plasmid
  source 1..23: mol_type = other DNA
acaccgccgttcttctgcatgtg

SEQ ID NO: 1123 - DNA, 23 bp, synthetic construct
  misc_feature 1..23: note = Description of Artificial Sequence: Synthetic oligonucleotide for generating gRNA expression plasmid
  source 1..23: mol_type = other DNA
acaccgccgttcttctggttgtg

SEQ ID NO: 1124 - DNA, 23 bp, synthetic construct
  misc_feature 1..23: note = Description of Artificial Sequence: Synthetic oligonucleotide for generating gRNA expression plasmid
  source 1..23: mol_type = other DNA
acaccgccgttcttctccttgtg

SEQ ID NO: 1125 - DNA, 23 bp, synthetic construct
  misc_feature 1..23: note = Description of Artificial Sequence: Synthetic oligonucleotide for generating gRNA expression plasmid
  source 1..23: mol_type = other DNA
acaccgccgttcttcagcttgtg

SEQ ID NO: 1126 - DNA, 23 bp, synthetic construct
  misc_feature 1..23: note = Description of Artificial Sequence: Synthetic oligonucleotide for generating gRNA expression plasmid
  source 1..23: mol_type = other DNA
acaccgccgttcttgtgcttgtg

SEQ ID NO: 1127 - DNA, 23 bp, synthetic construct
  misc_feature 1..23: note = Description of Artificial Sequence: Synthetic oligonucleotide for generating gRNA expression plasmid
  source 1..23: mol_type = other DNA
acaccgccgttctactgcttgtg

SEQ ID NO: 1128 - DNA, 23 bp, synthetic construct
  misc_feature 1..23: note = Description of Artificial Sequence: Synthetic oligonucleotide for generating gRNA expression plasmid
  source 1..23: mol_type = other DNA
acaccgccgttcatctgcttgtg

SEQ ID NO: 1129 - DNA, 23 bp, synthetic construct
  misc_feature 1..23: note = Description of Artificial Sequence: Synthetic oligonucleotide for generating gRNA expression plasmid
  source 1..23: mol_type = other DNA
acaccgccgttgttctgcttgtg

SEQ ID NO: 1130 - DNA, 23 bp, synthetic construct
  misc_feature 1..23: note = Description of Artificial Sequence: Synthetic oligonucleotide for generating gRNA expression plasmid
  source 1..23: mol_type = other DNA
acaccgccgtacttctgcttgtg

SEQ ID NO: 1131 - DNA, 23 bp, synthetic construct
  misc_feature 1..23: note = Description of Artificial Sequence: Synthetic oligonucleotide for generating gRNA expression plasmid
  source 1..23: mol_type = other DNA
acaccgccgatcttctgcttgtg

SEQ ID NO: 1132 - DNA, 23 bp, synthetic construct
  misc_feature 1..23: note = Description of Artificial Sequence: Synthetic oligonucleotide for generating gRNA expression plasmid
  source 1..23: mol_type = other DNA
acaccgcccttcttctgcttgtg

SEQ ID NO: 1133 - DNA, 23 bp, synthetic construct
  misc_feature 1..23: note = Description of Artificial Sequence: Synthetic oligonucleotide for generating gRNA expression plasmid
  source 1..23: mol_type = other DNA
acaccgcggttcttctgcttgtg

SEQ ID NO: 1134 - DNA, 23 bp, synthetic construct
  misc_feature 1..23: note = Description of Artificial Sequence: Synthetic oligonucleotide for generating gRNA expression plasmid
  source 1..23: mol_type = other DNA
acaccggcgttcttctgcttgtg

SEQ ID NO: 1135 - DNA, 23 bp, synthetic construct
  misc_feature 1..23: note = Description of Artificial Sequence: Synthetic oligonucleotide for generating gRNA expression plasmid
  source 1..23: mol_type = other DNA
acaccgccgttcttctgcttcag

SEQ ID NO: 1136 - DNA, 23 bp, synthetic construct
  misc_feature 1..23: note = Description of Artificial Sequence: Synthetic oligonucleotide for generating gRNA expression plasmid
  source 1..23: mol_type = other DNA
acaccgccgttcttctgcaagtg

SEQ ID NO: 1137 - DNA, 23 bp, synthetic construct
  misc_feature 1..23: note = Description of Artificial Sequence: Synthetic oligonucleotide for generating gRNA expression plasmid
  source 1..23: mol_type = other DNA
acaccgccgttcttctcgttgtg

SEQ ID NO: 1138 - DNA, 23 bp, synthetic construct
  misc_feature 1..23: note = Description of Artificial Sequence: Synthetic oligonucleotide for generating gRNA expression plasmid
  source 1..23: mol_type = other DNA
acaccgccgttcttgagcttgtg

SEQ ID NO: 1139 - DNA, 23 bp, synthetic construct
  misc_feature 1..23: note = Description of Artificial Sequence: Synthetic oligonucleotide for generating gRNA expression plasmid
  source 1..23: mol_type = other DNA
acaccgccgttcaactgcttgtg

SEQ ID NO: 1140 - DNA, 23 bp, synthetic construct
  misc_feature 1..23: note = Description of Artificial Sequence: Synthetic oligonucleotide for generating gRNA expression plasmid
  source 1..23: mol_type = other DNA
acaccgccgtagttctgcttgtg

SEQ ID NO: 1141 - DNA, 23 bp, synthetic construct
  misc_feature 1..23: note = Description of Artificial Sequence: Synthetic oligonucleotide for generating gRNA expression plasmid
  source 1..23: mol_type = other DNA
acaccgcccatcttctgcttgtg

SEQ ID NO: 1142 - DNA, 23 bp, synthetic construct
  misc_feature 1..23: note = Description of Artificial Sequence: Synthetic oligonucleotide for generating gRNA expression plasmid
  source 1..23: mol_type = other DNA
acaccggggttcttctgcttgtg

SEQ ID NO: 1143 - DNA, 23 bp, synthetic construct
  misc_feature 1..23: note = Description of Artificial Sequence: Synthetic oligonucleotide for generating gRNA expression plasmid
  source 1..23: mol_type = other DNA
acaccggtgcagatgaacttcag

SEQ ID NO: 1144 - DNA, 23 bp, synthetic construct
  misc_feature 1..23: note = Description of Artificial Sequence: Synthetic oligonucleotide for generating gRNA expression plasmid
  source 1..23: mol_type = other DNA
acaccggtgcagatgaacttctg

SEQ ID NO: 1145 - DNA, 23 bp, synthetic construct
  misc_feature 1..23: note = Description of Artificial Sequence: Synthetic oligonucleotide for generating gRNA expression plasmid
  source 1..23: mol_type = other DNA
acaccggtgcagatgaacttgag

SEQ ID NO: 1146 - DNA, 23 bp, synthetic construct
  misc_feature 1..23: note = Description of Artificial Sequence: Synthetic oligonucleotide for generating gRNA expression plasmid
  source 1..23: mol_type = other DNA
acaccggtgcagatgaactacag

SEQ ID NO: 1147 - DNA, 23 bp, synthetic construct
  misc_feature 1..23: note = Description of Artificial Sequence: Synthetic oligonucleotide for generating gRNA expression plasmid
  source 1..23: mol_type = other DNA
acaccggtgcagatgaacatcag

SEQ ID NO: 1148 - DNA, 23 bp, synthetic construct
  misc_feature 1..23: note = Description of Artificial Sequence: Synthetic oligonucleotide for generating gRNA expression plasmid
  source 1..23: mol_type = other DNA
acaccggtgcagatgaagttcag

SEQ ID NO: 1149 - DNA, 23 bp, synthetic construct
  misc_feature 1..23: note = Description of Artificial Sequence: Synthetic oligonucleotide for generating gRNA expression plasmid
  source 1..23: mol_type = other DNA
acaccggtgcagatgatcttcag

SEQ ID NO: 1150 - DNA, 23 bp, synthetic construct
  misc_feature 1..23: note = Description of Artificial Sequence: Synthetic oligonucleotide for generating gRNA expression plasmid
  source 1..23: mol_type = other DNA
acaccggtgcagatgtacttcag

SEQ ID NO: 1151 - DNA, 23 bp, synthetic construct
  misc_feature 1..23: note = Description of Artificial Sequence: Synthetic oligonucleotide for generating gRNA expression plasmid
  source 1..23: mol_type = other DNA
acaccggtgcagatcaacttcag

SEQ ID NO: 1152 - DNA, 23 bp, synthetic construct
  misc_feature 1..23: note = Description of Artificial Sequence: Synthetic oligonucleotide for generating gRNA expression plasmid
  source 1..23: mol_type = other DNA
acaccggtgcagaagaacttcag

SEQ ID NO: 1153 - DNA, 23 bp, synthetic construct
  misc_feature 1..23: note = Description of Artificial Sequence: Synthetic oligonucleotide for generating gRNA expression plasmid
  source 1..23: mol_type = other DNA
acaccggtgcagttgaacttcag

SEQ ID NO: 1154 - DNA, 23 bp, synthetic construct
  misc_feature 1..23: note = Description of Artificial Sequence: Synthetic oligonucleotide for generating gRNA expression plasmid
  source 1..23: mol_type = other DNA
acaccggtgcacatgaacttcag

SEQ ID NO: 1155 - DNA, 23 bp, synthetic construct
  misc_feature 1..23: note = Description of Artificial Sequence: Synthetic oligonucleotide for generating gRNA expression plasmid
  source 1..23: mol_type = other DNA
acaccggtgctgatgaacttcag

SEQ ID NO: 1156 - DNA, 23 bp, synthetic construct
  misc_feature 1..23: note = Description of Artificial Sequence: Synthetic oligonucleotide for generating gRNA expression plasmid
  source 1..23: mol_type = other DNA
acaccggtggagatgaacttcag

SEQ ID NO: 1157 - DNA, 23 bp, synthetic construct
  misc_feature 1..23: note = Description of Artificial Sequence: Synthetic oligonucleotide for generating gRNA expression plasmid
  source 1..23: mol_type = other DNA
acaccggtccagatgaacttcag

SEQ ID NO: 1158 - DNA, 23 bp, synthetic construct
  misc_feature 1..23: note = Description of Artificial Sequence: Synthetic oligonucleotide for generating gRNA expression plasmid
  source 1..23: mol_type = other DNA
acaccggagcagatgaacttcag

SEQ ID NO: 1159 - DNA, 23 bp, synthetic construct
  misc_feature 1..23: note = Description of Artificial Sequence: Synthetic oligonucleotide for generating gRNA expression plasmid
  source 1..23: mol_type = other DNA
acaccgctgcagatgaacttcag

SEQ ID NO: 1160 - DNA, 23 bp, synthetic construct
  misc_feature 1..23: note = Description of Artificial Sequence: Synthetic oligonucleotide for generating gRNA expression plasmid
  source 1..23: mol_type = other DNA
acaccggtgcagatgaacttgtg

SEQ ID NO: 1161 - DNA, 23 bp, synthetic construct
  misc_feature 1..23: note = Description of Artificial Sequence: Synthetic oligonucleotide for generating gRNA expression plasmid
  source 1..23: mol_type = other DNA
acaccggtgcagatgaacaacag

SEQ ID NO: 1162 - DNA, 23 bp, synthetic construct
  misc_feature 1..23: note = Description of Artificial Sequence: Synthetic oligonucleotide for generating gRNA expression plasmid
  source 1..23: mol_type = other DNA
acaccggtgcagatgatgttcag

SEQ ID NO: 1163 - DNA, 23 bp, synthetic construct
  misc_feature 1..23: note = Description of Artificial Sequence: Synthetic oligonucleotide for generating gRNA expression plasmid
  source 1..23: mol_type = other DNA
acaccggtgcagatctacttcag

SEQ ID NO: 1164 - DNA, 23 bp, synthetic construct
  misc_feature 1..23: note = Description of Artificial Sequence: Synthetic oligonucleotide for generating gRNA expression plasmid
  source 1..23: mol_type = other DNA
acaccggtgcagtagaacttcag

SEQ ID NO: 1165 - DNA, 23 bp, synthetic construct
  misc_feature 1..23: note = Description of Artificial Sequence: Synthetic oligonucleotide for generating gRNA expression plasmid
  source 1..23: mol_type = other DNA
acaccggtgctcatgaacttcag

SEQ ID NO: 1166 - DNA, 23 bp, synthetic construct
  misc_feature 1..23: note = Description of Artificial Sequence: Synthetic oligonucleotide for generating gRNA expression plasmid
  source 1..23: mol_type = other DNA
acaccggtcgagatgaacttcag

SEQ ID NO: 1167 - DNA, 23 bp, synthetic construct
  misc_feature 1..23: note = Description of Artificial Sequence: Synthetic oligonucleotide for generating gRNA expression plasmid
  source 1..23: mol_type = other DNA
acaccgcagcagatgaacttcag

SEQ ID NO: 1168 - DNA, 24 bp, synthetic construct
  misc_feature 1..24: note = Description of Artificial Sequence: Synthetic oligonucleotide for generating gRNA expression plasmid
  source 1..24: mol_type = other DNA
acaccgtggggggagtttgctccg

SEQ ID NO: 1169 - DNA, 23 bp, synthetic construct
  misc_feature 1..23: note = Description of Artificial Sequence: Synthetic oligonucleotide for generating gRNA expression plasmid
  source 1..23: mol_type = other DNA
acaccgagtgagtgtgtgcgtgg

SEQ ID NO: 1170 - DNA, 24 bp, synthetic construct
  misc_feature 1..24: note = Description of Artificial Sequence: Synthetic oligonucleotide for generating gRNA expression plasmid
  source 1..24: mol_type = other DNA
acaccgtccgagcagaagaagaag

SEQ ID NO: 1171 - DNA, 26 bp, synthetic construct
  misc_feature 1..26: note = Description of Artificial Sequence: Synthetic oligonucleotide for generating gRNA expression plasmid
  source 1..26: mol_type = other DNA
acaccgcagatgtagtgtttccacag

SEQ ID NO: 1172 - DNA, 23 bp, synthetic construct
  misc_feature 1..23: note = Description of Artificial Sequence: Synthetic oligonucleotide for generating gRNA expression plasmid
  source 1..23: mol_type = other DNA
acaccgatgtagtgtttccacag

SEQ ID NO: 1173 - DNA, 26 bp, synthetic construct
  misc_feature 1..26: note = Description of Artificial Sequence: Synthetic oligonucleotide for generating gRNA expression plasmid
  source 1..26: mol_type = other DNA
acacctccctctttagccagagccgg

SEQ ID NO: 1174 - DNA, 26 bp, synthetic construct
  misc_feature 1..26: note = Description of Artificial Sequence: Synthetic oligonucleotide for generating gRNA expression plasmid
  source 1..26: mol_type = other DNA
acaccgccgtttgtactttgtcctcg

SEQ ID NO: 1175 - DNA, 23 bp, synthetic construct
  misc_feature 1..23: note = Description of Artificial Sequence: Synthetic oligonucleotide for generating gRNA expression plasmid
  source 1..23: mol_type = other DNA
acaccgtttgtactttgtcctcg

SEQ ID NO: 1176 - DNA, 26 bp, synthetic construct
  misc_feature 1..26: note = Description of Artificial Sequence: Synthetic oligonucleotide for generating gRNA expression plasmid
  source 1..26: mol_type = other DNA
acaccgggaagactgaggctacatag

SEQ ID NO: 1177 - DNA, 24 bp, synthetic construct
  misc_feature 1..24: note = Description of Artificial Sequence: Synthetic oligonucleotide for generating gRNA expression plasmid
  source 1..24: mol_type = other DNA
acaccgaagactgaggctacatag

SEQ ID NO: 1178 - DNA, 26 bp, synthetic construct
  misc_feature 1..26: note = Description of Artificial Sequence: Synthetic oligonucleotide for generating gRNA expression plasmid
  source 1..26: mol_type = other DNA
acaccgaggcccccagagcagccacg

SEQ ID NO: 1179 - DNA, 23 bp, synthetic construct
  misc_feature 1..23: note = Description of Artificial Sequence: Synthetic oligonucleotide for generating gRNA expression plasmid
  source 1..23: mol_type = other DNA
acaccgcccccagagcagccacg

SEQ ID NO: 1180 - DNA, 24 bp, synthetic construct
  misc_feature 1..24: note = Description of Artificial Sequence: Synthetic oligonucleotide for generating gRNA expression plasmid
  source 1..24: mol_type = other DNA
aaaacggggcaagctgcccgtgcg

SEQ ID NO: 1181 - DNA, 24 bp, synthetic construct
  misc_feature 1..24: note = Description of Artificial Sequence: Synthetic oligonucleotide for generating gRNA expression plasmid
  source 1..24: mol_type = other DNA
aaaacgcggcaagctgcccgtgcg

SEQ ID NO: 1182 - DNA, 24 bp, synthetic construct
  misc_feature 1..24: note = Description of Artificial Sequence: Synthetic oligonucleotide for generating gRNA expression plasmid
  source 1..24: mol_type = other DNA
aaaaccgggcaagctgcccgtgcg

SEQ ID NO: 1183 - DNA, 24 bp, synthetic construct
  misc_feature 1..24: note = Description of Artificial Sequence: Synthetic oligonucleotide for generating gRNA expression plasmid
  source 1..24: mol_type = other DNA
aaaaccccgcaagctgcccgtgcg

SEQ ID NO: 1184 - DNA, 24 bp, synthetic construct
  misc_feature 1..24: note = Description of Artificial Sequence: Synthetic oligonucleotide for generating gRNA expression plasmid
  source 1..24: mol_type = other DNA
aaaacccgccaagctgcccgtgcg

SEQ ID NO: 1185 - DNA, 24 bp, synthetic construct
  misc_feature 1..24: note = Description of Artificial Sequence: Synthetic oligonucleotide for generating gRNA expression plasmid
  source 1..24: mol_type = other DNA
aaaacccgggaagctgcccgtgcg

SEQ ID NO: 1186 - DNA, 24 bp, synthetic construct
  misc_feature 1..24: note = Description of Artificial Sequence: Synthetic oligonucleotide for generating gRNA expression plasmid
  source 1..24: mol_type = other DNA
aaaacccggctagctgcccgtgcg

SEQ ID NO: 1187 - DNA, 24 bp, synthetic construct
  misc_feature 1..24: note = Description of Artificial Sequence: Synthetic oligonucleotide for generating gRNA expression plasmid
  source 1..24: mol_type = other DNA
aaaacccggcatgctgcccgtgcg

SEQ ID NO: 1188 - DNA, 24 bp, synthetic construct
  misc_feature 1..24: note = Description of Artificial Sequence: Synthetic oligonucleotide for generating gRNA expression plasmid
  source 1..24: mol_type = other DNA
aaaacccggcaacctgcccgtgcg

SEQ ID NO: 1189 - DNA, 24 bp, synthetic construct
  misc_feature 1..24: note = Description of Artificial Sequence: Synthetic oligonucleotide for generating gRNA expression plasmid
  source 1..24: mol_type = other DNA
aaaacccggcaaggtgcccgtgcg

SEQ ID NO: 1190 - DNA, 24 bp, synthetic construct
  misc_feature 1..24: note = Description of Artificial Sequence: Synthetic oligonucleotide for generating gRNA expression plasmid
  source 1..24: mol_type = other DNA
aaaacccggcaagcagcccgtgcg

SEQ ID NO: 1191 - DNA, 24 bp, synthetic construct
  misc_feature 1..24: note = Description of Artificial Sequence: Synthetic oligonucleotide for generating gRNA expression plasmid
  source 1..24: mol_type = other DNA
aaaacccggcaagctccccgtgcg

SEQ ID NO: 1192 - DNA, 24 bp, synthetic construct
  misc_feature 1..24: note = Description of Artificial Sequence: Synthetic oligonucleotide for generating gRNA expression plasmid
  source 1..24: mol_type = other DNA
aaaacccggcaagctggccgtgcg

SEQ ID NO: 1193 - DNA, 24 bp, synthetic construct
  misc_feature 1..24: note = Description of Artificial Sequence: Synthetic oligonucleotide for generating gRNA expression plasmid
  source 1..24: mol_type = other DNA
aaaacccggcaagctgcgcgtgcg

SEQ ID NO: 1194 - DNA, 24 bp, synthetic construct
  misc_feature 1..24: note = Description of Artificial Sequence: Synthetic oligonucleotide for generating gRNA expression plasmid
  source 1..24: mol_type = other DNA
aaaacccggcaagctgccggtgcg

SEQ ID NO: 1195 - DNA, 24 bp, synthetic construct
  misc_feature 1..24: note = Description of Artificial Sequence: Synthetic oligonucleotide for generating gRNA expression plasmid
  source 1..24: mol_type = other DNA
aaaacccggcaagctgcccctgcg

SEQ ID NO: 1196 - DNA, 24 bp, synthetic construct
  misc_feature 1..24: note = Description of Artificial Sequence: Synthetic oligonucleotide for generating gRNA expression plasmid
  source 1..24: mol_type = other DNA
aaaacccggcaagctgcccgagcg

SEQ ID NO: 1197 - DNA, 24 bp, synthetic construct
  misc_feature 1..24: note = Description of Artificial Sequence: Synthetic oligonucleotide for generating gRNA expression plasmid
  source 1..24: mol_type = other DNA
aaaacccggcaagctgcccgtccg

SEQ ID NO: 1198 - DNA, 24 bp, synthetic construct
  misc_feature 1..24: note = Description of Artificial Sequence: Synthetic oligonucleotide for generating gRNA expression plasmid
  source 1..24: mol_type = other DNA
aaaacggggcaagctgcccgtgcg

SEQ ID NO: 1199 - DNA, 24 bp, synthetic construct
  misc_feature 1..24: note = Description of Artificial Sequence: Synthetic oligonucleotide for generating gRNA expression plasmid
  source 1..24: mol_type = other DNA
aaaaccccccaagctgcccgtgcg

SEQ ID NO: 1200 - DNA, 24 bp, synthetic construct
  misc_feature 1..24: note = Description of Artificial Sequence: Synthetic oligonucleotide for generating gRNA expression plasmid
  source 1..24: mol_type = other DNA
aaaacccgggtagctgcccgtgcg

SEQ ID NO: 1201 - DNA, 24 bp, synthetic construct
  misc_feature 1..24: note = Description of Artificial Sequence: Synthetic oligonucleotide for generating gRNA expression plasmid
  source 1..24: mol_type = other DNA
aaaacccggcatcctgcccgtgcg

SEQ ID NO: 1202 - DNA, 24 bp, synthetic construct
  misc_feature 1..24: note = Description of Artificial Sequence: Synthetic oligonucleotide for generating gRNA expression plasmid
  source 1..24: mol_type = other DNA
aaaacccggcaaggagcccgtgcg

SEQ ID NO: 1203 - DNA, 24 bp, synthetic construct
  misc_feature 1..24: note = Description of Artificial Sequence: Synthetic oligonucleotide for generating gRNA expression plasmid
  source 1..24: mol_type = other DNA
aaaacccggcaagctcgccgtgcg

SEQ ID NO: 1204 - DNA, 24 bp, synthetic construct
  misc_feature 1..24: note = Description of Artificial Sequence: Synthetic oligonucleotide for generating gRNA expression plasmid
  source 1..24: mol_type = other DNA
aaaacccggcaagctgcgggtgcg

SEQ ID NO: 1205 - DNA, 24 bp, synthetic construct
  misc_feature 1..24: note = Description of Artificial Sequence: Synthetic oligonucleotide for generating gRNA expression plasmid
  source 1..24: mol_type = other DNA
aaaacccggcaagctgccccagcg

SEQ ID NO: 1206 - DNA, 24 bp, synthetic construct
  misc_feature 1..24: note = Description of Artificial Sequence: Synthetic oligonucleotide for generating gRNA expression plasmid
  source 1..24: mol_type = other DNA
aaaacccggcaagctgcccgaccg

SEQ ID NO: 1207 - DNA, 23 bp, synthetic construct
  misc_feature 1..23: note = Description of Artificial Sequence: Synthetic oligonucleotide for generating gRNA expression plasmid
  source 1..23: mol_type = other DNA
aaaacacaagcagaagaacggcg

SEQ ID NO: 1208 - DNA, 23 bp, synthetic construct
  misc_feature 1..23: note = Description of Artificial Sequence: Synthetic oligonucleotide for generating gRNA expression plasmid
  source 1..23: mol_type = other DNA
aaaactcaagcagaagaacggcg

SEQ ID NO: 1209 - DNA, 23 bp, synthetic construct
  misc_feature 1..23: note = Description of Artificial Sequence: Synthetic oligonucleotide for generating gRNA expression plasmid
  source 1..23: mol_type = other DNA
aaaacagaagcagaagaacggcg

SEQ ID NO: 1210 - DNA, 23 bp, synthetic construct
  misc_feature 1..23: note = Description of Artificial Sequence: Synthetic oligonucleotide for generating gRNA expression plasmid
  source 1..23: mol_type = other DNA
aaaacactagcagaagaacggcg

SEQ ID NO: 1211 - DNA, 23 bp, synthetic construct
  misc_feature 1..23: note = Description of Artificial Sequence: Synthetic oligonucleotide for generating gRNA expression plasmid
  source 1..23: mol_type = other DNA
aaaacacatgcagaagaacggcg

SEQ ID NO: 1212 - DNA, 23 bp, synthetic construct
  misc_feature 1..23: note = Description of Artificial Sequence: Synthetic oligonucleotide for generating gRNA expression plasmid
  source 1..23: mol_type = other DNA
aaaacacaaccagaagaacggcg

SEQ ID NO: 1213 - DNA, 23 bp, synthetic construct
  misc_feature 1..23: note = Description of Artificial Sequence: Synthetic oligonucleotide for generating gRNA expression plasmid
  source 1..23: mol_type = other DNA
aaaacacaaggagaagaacggcg

SEQ ID NO: 1214 - DNA, 23 bp, synthetic construct
  misc_feature 1..23: note = Description of Artificial Sequence: Synthetic oligonucleotide for generating gRNA expression plasmid
  source 1..23: mol_type = other DNA
aaaacacaagctgaagaacggcg

SEQ ID NO: 1215 - DNA, 23 bp, synthetic construct
  misc_feature 1..23: note = Description of Artificial Sequence: Synthetic oligonucleotide for generating gRNA expression plasmid
  source 1..23: mol_type = other DNA
aaaacacaagcacaagaacggcg

SEQ ID NO: 1216 - DNA, 23 bp, synthetic construct
  misc_feature 1..23: note = Description of Artificial Sequence: Synthetic oligonucleotide for generating gRNA expression plasmid
  source 1..23: mol_type = other DNA
aaaacacaagcagtagaacggcg

SEQ ID NO: 1217 - DNA, 23 bp, synthetic construct
  misc_feature 1..23: note = Description of Artificial Sequence: Synthetic oligonucleotide for generating gRNA expression plasmid
  source 1..23: mol_type = other DNA
aaaacacaagcagatgaacggcg

SEQ ID NO: 1218 - DNA, 23 bp, synthetic construct
  misc_feature 1..23: note = Description of Artificial Sequence: Synthetic oligonucleotide for generating gRNA expression plasmid
  source 1..23: mol_type = other DNA
aaaacacaagcagaacaacggcg

SEQ ID NO: 1219 - DNA, 23 bp, synthetic construct
  misc_feature 1..23: note = Description of Artificial Sequence: Synthetic oligonucleotide for generating gRNA expression plasmid
  source 1..23: mol_type = other DNA
aaaacacaagcagaagtacggcg

SEQ ID NO: 1220 - DNA, 23 bp, synthetic construct
  misc_feature 1..23: note = Description of Artificial Sequence: Synthetic oligonucleotide for generating gRNA expression plasmid
  source 1..23: mol_type = other DNA
aaaacacaagcagaagatcggcg

SEQ ID NO: 1221 - DNA, 23 bp, synthetic construct
  misc_feature 1..23: note = Description of Artificial Sequence: Synthetic oligonucleotide for generating gRNA expression plasmid
  source 1..23: mol_type = other DNA
aaaacacaagcagaagaagggcg

SEQ ID NO: 1222 - DNA, 23 bp, synthetic construct
  misc_feature 1..23: note = Description of Artificial Sequence: Synthetic oligonucleotide for generating gRNA expression plasmid
  source 1..23: mol_type = other DNA
aaaacacaagcagaagaaccgcg

SEQ ID NO: 1223 - DNA, 23 bp, synthetic construct
  misc_feature 1..23: note = Description of Artificial Sequence: Synthetic oligonucleotide for generating gRNA expression plasmid
  source 1..23: mol_type = other DNA
aaaacacaagcagaagaacgccg

SEQ ID NO: 1224 - DNA, 23 bp, synthetic construct
  misc_feature 1..23: note = Description of Artificial Sequence: Synthetic oligonucleotide for generating gRNA expression plasmid
  source 1..23: mol_type = other DNA
aaaactgaagcagaagaacggcg

SEQ ID NO: 1225 - DNA, 23 bp, synthetic construct
  misc_feature 1..23: note = Description of Artificial Sequence: Synthetic oligonucleotide for generating gRNA expression plasmid
  source 1..23: mol_type = other DNA
aaaacacttgcagaagaacggcg

SEQ ID NO: 1226 - DNA, 23 bp, synthetic construct
  misc_feature 1..23: note = Description of Artificial Sequence: Synthetic oligonucleotide for generating gRNA expression plasmid
  source 1..23: mol_type = other DNA
aaaacacaacgagaagaacggcg

SEQ ID NO: 1227 - DNA, 23 bp, synthetic construct
  misc_feature 1..23: note = Description of Artificial Sequence: Synthetic oligonucleotide for generating gRNA expression plasmid
  source 1..23: mol_type = other DNA
aaaacacaagctcaagaacggcg

SEQ ID NO: 1228 - DNA, 23 bp, synthetic construct
  misc_feature 1..23: note = Description of Artificial Sequence: Synthetic oligonucleotide for generating gRNA expression plasmid
  source 1..23: mol_type = other DNA
aaaacacaagcagttgaacggcg

SEQ ID NO: 1229 - DNA, 23 bp, synthetic construct
  misc_feature 1..23: note = Description of Artificial Sequence: Synthetic oligonucleotide for generating gRNA expression plasmid
  source 1..23: mol_type = other DNA
aaaacacaagcagaactacggcg

SEQ ID NO: 1230 - DNA, 23 bp, synthetic construct
  misc_feature 1..23: note = Description of Artificial Sequence: Synthetic oligonucleotide for generating gRNA expression plasmid
  source 1..23: mol_type = other DNA
aaaacacaagcagaagatgggcg

SEQ ID NO: 1231 - DNA, 23 bp, synthetic construct
  misc_feature 1..23: note = Description of Artificial Sequence: Synthetic oligonucleotide for generating gRNA expression plasmid
  source 1..23: mol_type = other DNA
aaaacacaagcagaagaaccccg

SEQ ID NO: 1232 - DNA, 23 bp, synthetic construct
  misc_feature 1..23: note = Description of Artificial Sequence: Synthetic oligonucleotide for generating gRNA expression plasmid
  source 1..23: mol_type = other DNA
aaaactctagttcatctgcaccg

SEQ ID NO: 1233 - DNA, 23 bp, synthetic construct
  misc_feature 1..23: note = Description of Artificial Sequence: Synthetic oligonucleotide for generating gRNA expression plasmid
  source 1..23: mol_type = other DNA
aaaactcaagttcatctgcaccg

SEQ ID NO: 1234 - DNA, 23 bp, synthetic construct
  misc_feature 1..23: note = Description of Artificial Sequence: Synthetic oligonucleotide for generating gRNA expression plasmid
  source 1..23: mol_type = other DNA
aaaactgtagttcatctgcaccg

SEQ ID NO: 1235 - DNA, 23 bp, synthetic construct
  misc_feature 1..23: note = Description of Artificial Sequence: Synthetic oligonucleotide for generating gRNA expression plasmid
  source 1..23: mol_type = other DNA
aaaactgatgttcatctgcaccg

SEQ ID NO: 1236 - DNA, 23 bp, synthetic construct
  misc_feature 1..23: note = Description of Artificial Sequence: Synthetic oligonucleotide for generating gRNA expression plasmid
  source 1..23: mol_type = other DNA
aaaactgaacttcatctgcaccg

SEQ ID NO: 1237 - DNA, 23 bp, synthetic construct
  misc_feature 1..23: note = Description of Artificial Sequence: Synthetic oligonucleotide for generating gRNA expression plasmid
  source 1..23: mol_type = other DNA
aaaactgaagatcatctgcaccg

SEQ ID NO: 1238 - DNA, 23 bp, synthetic construct
  misc_feature 1..23: note = Description of Artificial Sequence: Synthetic oligonucleotide for generating gRNA expression plasmid
  source 1..23: mol_type = other DNA
aaaactgaagtacatctgcaccg

SEQ ID NO: 1239 - DNA, 23 bp, synthetic construct
  misc_feature 1..23: note = Description of Artificial Sequence: Synthetic oligonucleotide for generating gRNA expression plasmid
  source 1..23: mol_type = other DNA
aaaactgaagttgatctgcaccg

SEQ ID NO: 1240 - DNA, 23 bp, synthetic construct
  misc_feature 1..23: note = Description of Artificial Sequence: Synthetic oligonucleotide for generating gRNA expression plasmid
  source 1..23: mol_type = other DNA
aaaactgaagttcttctgcaccg

SEQ ID NO: 1241 - DNA, 23 bp, synthetic construct
  misc_feature 1..23: note = Description of Artificial Sequence: Synthetic oligonucleotide for generating gRNA expression plasmid
  source 1..23: mol_type = other DNA
aaaactgaagttcaactgcaccg

SEQ ID NO: 1242 - DNA, 23 bp, synthetic construct
  misc_feature 1..23: note = Description of Artificial Sequence: Synthetic oligonucleotide for generating gRNA expression plasmid
  source 1..23: mol_type = other DNA
aaaactgaagttcatgtgcaccg

SEQ ID NO: 1243 - DNA, 23 bp, synthetic construct
  misc_feature 1..23: note = Description of Artificial Sequence: Synthetic oligonucleotide for generating gRNA expression plasmid
  source 1..23: mol_type = other DNA
aaaactgaagttcatcagcaccg

SEQ ID NO: 1244 - DNA, 23 bp, synthetic construct
  misc_feature 1..23: note = Description of Artificial Sequence: Synthetic oligonucleotide for generating gRNA expression plasmid
  source 1..23: mol_type = other DNA
aaaactgaagttcatctccaccg

SEQ ID NO: 1245 - DNA, 23 bp, synthetic construct
  misc_feature 1..23: note = Description of Artificial Sequence: Synthetic oligonucleotide for generating gRNA expression plasmid
  source 1..23: mol_type = other DNA
aaaactgaagttcatctggaccg

SEQ ID NO: 1246 - DNA, 23 bp, synthetic construct
  misc_feature 1..23: note = Description of Artificial Sequence: Synthetic oligonucleotide for generating gRNA expression plasmid
  source 1..23: mol_type = other DNA
aaaactgaagttcatctgctccg

SEQ ID NO: 1247 - DNA, 23 bp, synthetic construct
  misc_feature 1..23: note = Description of Artificial Sequence: Synthetic oligonucleotide for generating gRNA expression plasmid
  source 1..23: mol_type = other DNA
aaaactgaagttcatctgcagcg

SEQ ID NO: 1248 - DNA, 23 bp, synthetic construct
  misc_feature 1..23: note = Description of Artificial Sequence: Synthetic oligonucleotide for generating gRNA expression plasmid
  source 1..23: mol_type = other DNA
aaaactgaagttcatctgcagcg

SEQ ID NO: 1249 - DNA, 23 bp, synthetic construct
  misc_feature 1..23: note = Description of Artificial Sequence: Synthetic oligonucleotide for generating gRNA expression plasmid
  source 1..23: mol_type = other DNA
aaaacacaagttcatctgcaccg

SEQ ID NO: 1250 - DNA, 23 bp, synthetic construct
  misc_feature 1..23: note = Description of Artificial Sequence: Synthetic oligonucleotide for generating gRNA expression plasmid
  source 1..23: mol_type = other DNA
aaaactgttgttcatctgcaccg

SEQ ID NO: 1251 - DNA, 23 bp, synthetic construct
  misc_feature 1..23: note = Description of Artificial Sequence: Synthetic oligonucleotide for generating gRNA expression plasmid
  source 1..23: mol_type = other DNA
aaaactgaacatcatctgcaccg

SEQ ID NO: 1252 - DNA, 23 bp, synthetic construct
  misc_feature 1..23: note = Description of Artificial Sequence: Synthetic oligonucleotide for generating gRNA expression plasmid
  source 1..23: mol_type = other DNA
aaaactgaagtagatctgcaccg

SEQ ID NO: 1253 - DNA, 23 bp, synthetic construct
  misc_feature 1..23: note = Description of Artificial Sequence: Synthetic oligonucleotide for generating gRNA expression plasmid
  source 1..23: mol_type = other DNA
aaaactgaagttctactgcaccg

SEQ ID NO: 1254 - DNA, 23 bp, synthetic construct
  misc_feature 1..23: note = Description of Artificial Sequence: Synthetic oligonucleotide for generating gRNA expression plasmid
  source 1..23: mol_type = other DNA
aaaactgaagttcatgagcaccg

SEQ ID NO: 1255 - DNA, 23 bp, synthetic construct
  misc_feature 1..23: note = Description of Artificial Sequence: Synthetic oligonucleotide for generating gRNA expression plasmid
  source 1..23: mol_type = other DNA
aaaactgaagttcatctcgaccg

SEQ ID NO: 1256 - DNA, 23 bp, synthetic construct
  misc_feature 1..23: note = Description of Artificial Sequence: Synthetic oligonucleotide for generating gRNA expression plasmid
  source 1..23: mol_type = other DNA
aaaactgaagttcatctgctgcg

SEQ ID NO: 1257 - DNA, 24 bp, synthetic construct
  misc_feature 1..24: note = Description of Artificial Sequence: Synthetic oligonucleotide for generating gRNA expression plasmid
  source 1..24: mol_type = other DNA
aaaacggagcaaactccccccacg

SEQ ID NO: 1258 - DNA, 23 bp, synthetic construct
  misc_feature 1..23: note = Description of Artificial Sequence: Synthetic oligonucleotide for generating gRNA expression plasmid
  source 1..23: mol_type = other DNA
aaaaccacgcacacactcactcg

SEQ ID NO: 1259 - DNA, 24 bp, synthetic construct
  misc_feature 1..24: note = Description of Artificial Sequence: Synthetic oligonucleotide for generating gRNA expression plasmid
  source 1..24: mol_type = other DNA
aaaacttcttcttctgctcggacg

SEQ ID NO: 1260 - DNA, 26 bp, synthetic construct
  misc_feature 1..26: note = Description of Artificial Sequence: Synthetic oligonucleotide for generating gRNA expression plasmid
  source 1..26: mol_type = other DNA
aaaactgtggaaacactacatctgcg

SEQ ID NO: 1261 - DNA, 23 bp, synthetic construct
  misc_feature 1..23: note = Description of Artificial Sequence: Synthetic oligonucleotide for generating gRNA expression plasmid
  source 1..23: mol_type = other DNA
aaaactgtggaaacactacatcg

SEQ ID NO: 1262 - DNA, 26 bp, synthetic construct
  misc_feature 1..26: note = Description of Artificial Sequence: Synthetic oligonucleotide for generating gRNA expression plasmid
  source 1..26: mol_type = other DNA
aaaaccggctctggctaaagagggag

SEQ ID NO: 1263 - DNA, 26 bp, synthetic construct
  misc_feature 1..26: note = Description of Artificial Sequence: Synthetic oligonucleotide for generating gRNA expression plasmid
  source 1..26: mol_type = other DNA
aaaacgaggacaaagtacaaacggcg

SEQ ID NO: 1264 - DNA, 23 bp, synthetic construct
  misc_feature 1..23: note = Description of Artificial Sequence: Synthetic oligonucleotide for generating gRNA expression plasmid
  source 1..23: mol_type = other DNA
aaaacgaggacaaagtacaaacg

SEQ ID NO: 1265 - DNA, 26 bp, synthetic construct
  misc_feature 1..26: note = Description of Artificial Sequence: Synthetic oligonucleotide for generating gRNA expression plasmid
  source 1..26: mol_type = other DNA
aaaactatgtagcctcagtcttcccg

SEQ ID NO: 1266 - DNA, 24 bp, synthetic construct
  misc_feature 1..24: note = Description of Artificial Sequence: Synthetic oligonucleotide for generating gRNA expression plasmid
  source 1..24: mol_type = other DNA
aaaactatgtagcctcagtcttcg

SEQ ID NO: 1267 - DNA, 26 bp, synthetic construct
  misc_feature 1..26: note = Description of Artificial Sequence: Synthetic oligonucleotide for generating gRNA expression plasmid
  source 1..26: mol_type = other DNA
aaaacgtggctgctctgggggcctcg

SEQ ID NO: 1268 - DNA, 23 bp, synthetic construct
  misc_feature 1..23: note = Description of Artificial Sequence: Synthetic oligonucleotide for generating gRNA expression plasmid
  source 1..23: mol_type = other DNA
aaaacgtggctgctctgggggcg

SEQ ID NO: 1269 - DNA, 23 bp, synthetic construct
  misc_feature 1..23: note = Description of Artificial Sequence: Synthetic expected off-target sequence
  source 1..23: mol_type = other DNA
gggtggggggagtttgctcctgg

SEQ ID NO: 1270 - DNA, 20 bp, synthetic construct
  misc_feature 1..20: note = Description of Artificial Sequence: Synthetic PCR primer
  source 1..20: mol_type = other DNA
tccagatggcacattgtcag

SEQ ID NO: 1271 - DNA, 20 bp, synthetic construct
  misc_feature 1..20: note = Description of Artificial Sequence: Synthetic PCR primer
  source 1..20: mol_type = other DNA
agggagcaggaaagtgaggt

SEQ ID NO: 1272 - DNA, 23 bp, synthetic construct
  misc_feature 1..23: note = Description of Artificial Sequence: Synthetic expected off-target sequence
  source 1..23: mol_type = other DNA
gggtggggggagtttgccccagg

SEQ ID NO: 1273 - DNA, 20 bp, synthetic construct
  misc_feature 1..20: note = Description of Artificial Sequence: Synthetic PCR primer
  source 1..20: mol_type = other DNA
ggggcccactcttcttccat

SEQ ID NO: 1274 - DNA, 20 bp, synthetic construct
  misc_feature 1..20: note = Description of Artificial Sequence: Synthetic PCR primer
  source 1..20: mol_type = other DNA
acccagactcctggtgtggc

SEQ ID NO: 1275 - DNA, 23 bp, synthetic construct
  misc_feature 1..23: note = Description of Artificial Sequence: Synthetic expected off-target sequence
  source 1..23: mol_type = other DNA
gcgtggggggtgtttgctcccgg

SEQ ID NO: 1276 - DNA, 22 bp, synthetic construct
  misc_feature 1..22: note = Description of Artificial Sequence: Synthetic PCR primer
  source 1..22: mol_type = other DNA
gctaagcagagatgcctatgcc

SEQ ID NO: 1277 - DNA, 20 bp, synthetic construct
  misc_feature 1..20: note = Description of Artificial Sequence: Synthetic PCR primer
  source 1..20: mol_type = other DNA
accaccctttcccccagaaa

SEQ ID NO: 1278 - DNA, 23 bp, synthetic construct
  misc_feature 1..23: note = Description of Artificial Sequence: Synthetic expected off-target sequence
  source 1..23: mol_type = other DNA
ggatggagggagtttgctcctgg

SEQ ID NO: 1279 - DNA, 20 bp, synthetic construct
  misc_feature 1..20: note = Description of Artificial Sequence: Synthetic PCR primer
  source 1..20: mol_type = other DNA
accccacagccaggttttca

SEQ ID NO: 1280 - DNA, 21 bp, synthetic construct
  misc_feature 1..21: note = Description of Artificial Sequence: Synthetic PCR primer
  source 1..21: mol_type = other DNA
gaatcactgcacctggccatc

SEQ ID NO: 1281 - DNA, 23 bp, synthetic construct
  misc_feature 1..23: note = Description of Artificial Sequence: Synthetic expected off-target sequence
  source 1..23: mol_type = other DNA
gggagggtggagtttgctcctgg

SEQ ID NO: 1282 - DNA, 20 bp, synthetic construct
  misc_feature 1..20: note = Description of Artificial Sequence: Synthetic PCR primer
  source 1..20: mol_type = other DNA
tgcggcaacttcagacaacc

SEQ ID NO: 1283 - DNA, 20 bp, synthetic construct
  misc_feature 1..20: note = Description of Artificial Sequence: Synthetic PCR primer
  source 1..20: mol_type = other DNA
taaagggcgtgctgggagag

SEQ ID NO: 1284 - DNA, 23 bp, synthetic construct
  misc_feature 1..23: note = Description of Artificial Sequence: Synthetic expected off-target sequence
  source 1..23: mol_type = other DNA
gggtgggtggagtttgctactgg

SEQ ID NO: 1285 - DNA, 20 bp, synthetic construct
  misc_feature 1..20: note = Description of Artificial Sequence: Synthetic PCR primer
  source 1..20: mol_type = other DNA
gcatgtcaggatctgacccc

SEQ ID NO: 1286 - DNA, 20 bp, synthetic construct
  misc_feature 1..20: note = Description of Artificial Sequence: Synthetic PCR primer
  source 1..20: mol_type = other DNA
tgcagggccatcttgtgtgt

SEQ ID NO: 1287 - DNA, 23 bp, synthetic construct
  misc_feature 1..23: note = Description of Artificial Sequence: Synthetic expected off-target sequence
  source 1..23: mol_type = other DNA
cgggggagggagtttgctcctgg

SEQ ID NO: 1288 - DNA, 20 bp, synthetic construct
  misc_feature 1..20: note = Description of Artificial Sequence: Synthetic PCR primer
  source 1..20: mol_type = other DNA
ccaccacatgttctgggtgc

SEQ ID NO: 1289 - DNA, 20 bp, synthetic construct
  misc_feature 1..20: note = Description of Artificial Sequence: Synthetic PCR primer
  source 1..20: mol_type = other DNA
ctgggtctgttccctgtggg

SEQ ID NO: 1290 - DNA, 23 bp, synthetic construct
  misc_feature 1..23: note = Description of Artificial Sequence: Synthetic expected off-target sequence
  source 1..23: mol_type = other DNA
gagtgggtggagtttgctacagg

SEQ ID NO: 1291 - DNA, 20 bp, synthetic construct
  misc_feature 1..20: note = Description of Artificial Sequence: Synthetic PCR primer
  source 1..20: mol_type = other DNA
ggctctccctgccctagttt

SEQ ID NO: 1292 - DNA, 20 bp, synthetic construct
  misc_feature 1..20: note = Description of Artificial Sequence: Synthetic PCR primer
  source 1..20: mol_type = other DNA
gcaggtcaagttggaacccg

SEQ ID NO: 1293 - DNA, 23 bp, synthetic construct
  misc_feature 1..23: note = Description of Artificial Sequence: Synthetic expected off-target sequence
  source 1..23: mol_type = other DNA
gggaggggagagtttgttccagg

SEQ ID NO: 1294 - DNA, 24 bp, synthetic construct
  misc_feature 1..24: note = Description of Artificial Sequence: Synthetic PCR primer
  source 1..24: mol_type = other DNA
ggggctgagaacacatgagatgca

SEQ ID NO: 1295 - DNA, 21 bp, synthetic construct
  misc_feature 1..21: note = Description of Artificial Sequence: Synthetic PCR primer
  source 1..21: mol_type = other DNA
agatttgtgcactgcctgcct

SEQ ID NO: 1296 - DNA, 23 bp, synthetic construct
  misc_feature 1..23: note = Description of Artificial Sequence: Synthetic expected off-target sequence
  source 1..23: mol_type = other DNA
gggagggggcaggttgctccagg

SEQ ID NO: 1297 - DNA, 20 bp, synthetic construct
  misc_feature 1..20: note = Description of Artificial Sequence: Synthetic PCR primer
  source 1..20: mol_type = other DNA
cccgacctccgctccaaagc

SEQ ID NO: 1298 - DNA, 20 bp, synthetic construct
  misc_feature 1..20: note = Description of Artificial Sequence: Synthetic PCR primer
  source 1..20: mol_type = other DNA
ggacctctgcacaccctggc

SEQ ID NO: 1299 - DNA, 23 bp, synthetic construct
  misc_feature 1..23: note = Description of Artificial Sequence: Synthetic expected off-target sequence
  source 1..23: mol_type = other DNA
gggaggggggagtgtgttccggg

SEQ ID NO: 1300 - DNA, 20 bp, synthetic construct
  misc_feature 1..20: note = Description of Artificial Sequence: Synthetic PCR primer
  source 1..20: mol_type = other DNA
tgcaaggtcgcatagtccca

SEQ ID NO: 1301 - DNA, 20 bp, synthetic construct
  misc_feature 1..20: note = Description of Artificial Sequence: Synthetic PCR primer
  source 1..20: mol_type = other DNA
caggagggggaagtgtgtcc

SEQ ID NO: 1302 - DNA, 23 bp, synthetic construct
  misc_feature 1..23: note = Description of Artificial Sequence: Synthetic expected off-target sequence
  source 1..23: mol_type = other DNA
ggggaggggaagtttgctcctgg

SEQ ID NO: 1303 - DNA, 21 bp, synthetic construct
  misc_feature 1..21: note = Description of Artificial Sequence: Synthetic PCR primer
  source 1..21: mol_type = other DNA
gcccattctttttgcagtgga

SEQ ID NO: 1304 - DNA, 22 bp, synthetic construct
  misc_feature 1..22: note = Description of Artificial Sequence: Synthetic PCR primer
  source 1..22: mol_type = other DNA
gagagcaagtttgttccccagg

SEQ ID NO: 1305 - DNA, 23 bp, synthetic construct
  misc_feature 1..23: note = Description of Artificial Sequence: Synthetic expected off-target sequence
  source 1..23: mol_type = other DNA
gggggtggggactttgctccagg

SEQ ID NO: 1306 - DNA, 20 bp, synthetic construct
  misc_feature 1..20: note = Description of Artificial Sequence: Synthetic PCR primer
  source 1..20: mol_type = other DNA
gcccccagcccctctgtttc

SEQ ID NO: 1307 - DNA, 20 bp, synthetic construct
  misc_feature 1..20: note = Description of Artificial Sequence: Synthetic PCR primer
  source 1..20: mol_type = other DNA
gctgctggtaggggagctgg

SEQ ID NO: 1308 - DNA, 23 bp, synthetic construct
  misc_feature 1..23: note = Description of Artificial Sequence: Synthetic expected off-target sequence
  source 1..23: mol_type = other DNA
gggtcgggggagtgggctccagg

SEQ ID NO: 1309 - DNA, 20 bp, synthetic construct
  misc_feature 1..20: note = Description of Artificial Sequence: Synthetic PCR primer
  source 1..20: mol_type = other DNA
cggctgccttccctgagtcc

SEQ ID NO: 1310 - DNA, 20 bp, synthetic construct
  misc_feature 1..20: note = Description of Artificial Sequence: Synthetic PCR primer
  source 1..20: mol_type = other DNA
gggtgacgcttgccatgagc

SEQ ID NO: 1311 - DNA, 23 bp, synthetic construct
  misc_feature 1..23: note = Description of Artificial Sequence: Synthetic expected off-target sequence
  source 1..23: mol_type = other DNA
gggtggctggagtttgctgctgg

SEQ ID NO: 1312 - DNA, 26 bp, synthetic construct
  misc_feature 1..26: note = Description of Artificial Sequence: Synthetic PCR primer
  source 1..26: mol_type = other DNA
tgaccctggagtacaaaatgttccca

SEQ ID NO: 1313 - DNA, 21 bp, synthetic construct
  misc_feature 1..21: note = Description of Artificial Sequence: Synthetic PCR primer
  source 1..21: mol_type = other DNA
gctgagacaaccagcccagct

SEQ ID NO: 1314 - DNA, 23 bp, synthetic construct
  misc_feature 1..23: note = Description of Artificial Sequence: Synthetic expected off-target sequence
  source 1..23: mol_type = other DNA
gggtggggggtgcctgctccagg

SEQ ID NO: 1315 - DNA, 20 bp, synthetic construct
  misc_feature 1..20: note = Description of Artificial Sequence: Synthetic PCR primer
  source 1..20: mol_type = other DNA
tgcctccacccttagcccct

SEQ ID NO: 1316 - DNA, 20 bp, synthetic construct
  misc_feature 1..20: note = Description of Artificial Sequence: Synthetic PCR primer
  source 1..20: mol_type = other DNA
gcagccgatccacactgggg

SEQ ID NO: 1317 - DNA, 23 bp, synthetic construct
  misc_feature 1..23: note = Description of Artificial Sequence: Synthetic expected off-target sequence
  source 1..23: mol_type = other DNA
ggttgaggggagtctgctccagg

SEQ ID NO: 1318 - DNA, 22 bp, synthetic construct
  misc_feature 1..22: note = Description of Artificial Sequence: Synthetic PCR primer
  source 1..22: mol_type = other DNA
aactcaggacaacactgcctgt

SEQ ID NO: 1319 - DNA, 21 bp, synthetic construct
  misc_feature 1..21: note = Description of Artificial Sequence: Synthetic PCR primer
  source 1..21: mol_type = other DNA
cccaggagcagggtacaatgc

SEQ ID NO: 1320 - DNA, 23 bp, synthetic construct
  misc_feature 1..23: note = Description of Artificial Sequence: Synthetic expected off-target sequence
  source 1..23: mol_type = other DNA
gtgtgggtggcgtttgctccagg

SEQ ID NO: 1321 - DNA, 20 bp, synthetic construct
  misc_feature 1..20: note = Description of Artificial Sequence: Synthetic PCR primer
  source 1..20: mol_type = other DNA
tcctccttggagaggggccc

SEQ ID NO: 1322 - DNA, 21 bp, synthetic construct
  misc_feature 1..21: note = Description of Artificial Sequence: Synthetic PCR primer
  source 1..21: mol_type = other DNA
ccttggaaggggccttggtgg

SEQ ID NO: 1323 - DNA, 23 bp, synthetic construct
  misc_feature 1..23: note = Description of Artificial Sequence: Synthetic expected off-target sequence
  source 1..23: mol_type = other DNA
aggtggtgggagcttgttcctgg

SEQ ID NO: 1324 - DNA, 20 bp, synthetic construct
  misc_feature 1..20: note = Description of Artificial Sequence: Synthetic PCR primer
  source 1..20: mol_type = other DNA
ccgagggcatgggcaatcct

SEQ ID NO: 1325 - DNA, 20 bp, synthetic construct
  misc_feature 1..20: note = Description of Artificial Sequence: Synthetic PCR primer
  source 1..20: mol_type = other DNA
ggctgctgcgagttgccaac

SEQ ID NO: 1326 - DNA, 23 bp, synthetic construct
  misc_feature 1..23: note = Description of Artificial Sequence: Synthetic expected off-target sequence
  source 1..23: mol_type = other DNA
agtttgggggagtttgccccagg

SEQ ID NO: 1327 - DNA, 23 bp, synthetic construct
  misc_feature 1..23: note = Description of Artificial Sequence: Synthetic PCR primer
  source 1..23: mol_type = other DNA
tgctttgcatggggtctcagaca

SEQ ID NO: 1328 - DNA, 20 bp, synthetic construct
  misc_feature 1..20: note = Description of Artificial Sequence: Synthetic PCR primer
  source 1..20: mol_type = other DNA
gggttgcttgccctctgtgt

SEQ ID NO: 1329 - DNA, 23 bp, synthetic construct
  misc_feature 1..23: note = Description of Artificial Sequence: Synthetic expected off-target sequence
  source 1..23: mol_type = other DNA
atgtgtggggaatttgctccagg

SEQ ID NO: 1330 - DNA, 27 bp, synthetic construct
  misc_feature 1..27: note = Description of Artificial Sequence: Synthetic PCR primer
  source 1..27: mol_type = other DNA
agctccttctcatttctcttctgctgt

SEQ ID NO: 1331 - DNA, 22 bp, synthetic construct
  misc_feature 1..22: note = Description of Artificial Sequence: Synthetic PCR primer
  source 1..22: mol_type = other DNA
cacagaaggatgtgtgcaggtt

SEQ ID NO: 1332 - DNA, 23 bp, synthetic construct
  misc_feature 1..23: note = Description of Artificial Sequence: Synthetic expected off-target sequence
  source 1..23: mol_type = other DNA
cagtggggggagctttctcctgg

SEQ ID NO: 1333 - DNA, 23 bp, synthetic construct
  misc_feature 1..23: note = Description of Artificial Sequence: Synthetic PCR primer
  source 1..23: mol_type = other DNA
agcagacacaggtgaatgctgct

SEQ ID NO: 1334 - DNA, 21 bp, synthetic construct
  misc_feature 1..21: note = Description of Artificial Sequence: Synthetic PCR primer
  source 1..21: mol_type = other DNA
ggtcaggtgtgctgctaggca

SEQ ID NO: 1335 - DNA, 23 bp, synthetic construct
  misc_feature 1..23: note = Description of Artificial Sequence: Synthetic expected off-target sequence
  source 1..23: mol_type = other DNA
gagggggagcagtttgctccagg

SEQ ID NO: 1336 - DNA, 20 bp, synthetic construct
  misc_feature 1..20: note = Description of Artificial Sequence: Synthetic PCR primer
  source 1..20: mol_type = other DNA
cctgtggggctctcaggtgc

SEQ ID NO: 1337 - DNA, 21 bp, synthetic construct
  misc_feature 1..21: note = Description of Artificial Sequence: Synthetic PCR primer
  source 1..21: mol_type = other DNA
actgcctgccaaagtgggtgt

SEQ ID NO: 1338 - DNA, 23 bp, synthetic construct
  misc_feature 1..23: note = Description of Artificial Sequence: Synthetic expected off-target sequence
  source 1..23: mol_type = other DNA
ggaggaggggagtctgctccagg

SEQ ID NO: 1339 - DNA, 20 bp, synthetic construct
  misc_feature 1..20: note = Description of Artificial Sequence: Synthetic PCR primer
  source 1..20: mol_type = other DNA
agctgcactggggaatgagt

SEQ ID NO: 1340 - DNA, 20 bp, synthetic construct
  misc_feature 1..20: note = Description of Artificial Sequence: Synthetic PCR primer
  source 1..20: mol_type = other DNA
tgccgggtaatagctggctt

SEQ ID NO: 1341 - DNA, 23 bp, synthetic construct
  misc_feature 1..23: note = Description of Artificial Sequence: Synthetic expected off-target sequence
  source 1..23: mol_type = other DNA
ggagggggggcttttgctccagg

SEQ ID NO: 1342 - DNA, 20 bp, synthetic construct
  misc_feature 1..20: note = Description of Artificial Sequence: Synthetic PCR primer
  source 1..20: mol_type = other DNA
ccagcctgggcaacaaagcg

SEQ ID NO: 1343 - DNA, 20 bp, synthetic construct
  misc_feature 1..20: note = Description of Artificial Sequence: Synthetic PCR primer
  source 1..20: mol_type = other DNA
gggggcttccaggtcacagg

SEQ ID NO: 1344 - DNA, 23 bp, synthetic construct
  misc_feature 1..23: note = Description of Artificial Sequence: Synthetic expected off-target sequence
  source 1..23: mol_type = other DNA
gggcaaggggaggttgctcctgg

SEQ ID NO: 1345 - DNA, 20 bp, synthetic construct
  misc_feature 1..20: note = Description of Artificial Sequence: Synthetic PCR primer
  source 1..20: mol_type = other DNA
tacccccactgccccattgc

SEQ ID NO: 1346 - DNA, 23 bp, synthetic construct
  misc_feature 1..23: note = Description of Artificial Sequence: Synthetic PCR primer
  source 1..23: mol_type = other DNA
acaggtccatgcttagcagaggg

SEQ ID NO: 1347 - DNA, 23 bp, synthetic construct
  misc_feature 1..23: note = Description of Artificial Sequence: Synthetic expected off-target sequence
  source 1..23: mol_type = other DNA
gggtgattgaagtttgctccagg

SEQ ID NO: 1348 - DNA, 21 bp, synthetic construct
  misc_feature 1..21: note = Description of Artificial Sequence: Synthetic PCR primer
  source 1..21: mol_type = other DNA
acggattcacgacggaggtgc

SEQ ID NO: 1349 - DNA, 20 bp, synthetic construct
  misc_feature 1..20: note = Description of Artificial Sequence: Synthetic PCR primer
  source 1..20: mol_type = other DNA
ccgagtccgtggcagagagc

SEQ ID NO: 1350 - DNA, 23 bp, synthetic construct
  misc_feature 1..23: note = Description of Artificial Sequence: Synthetic expected off-target sequence
  source 1..23: mol_type = other DNA
gggtgtggggtcattgctccagg

SEQ ID NO: 1351 - DNA, 23 bp, synthetic construct
  misc_feature 1..23: note = Description of Artificial Sequence: Synthetic PCR primer
  source 1..23: mol_type = other DNA
tgtggttgaagtaggggacaggt

SEQ ID NO: 1352 - DNA, 24 bp, synthetic construct
  misc_feature 1..24: note = Description of Artificial Sequence: Synthetic PCR primer
  source 1..24: mol_type = other DNA
tggcccaattggaagtgatttcgt

SEQ ID NO: 1353 - DNA, 23 bp, synthetic construct
  misc_feature 1..23: note = Description of Artificial Sequence: Synthetic expected off-target sequence
  source 1..23: mol_type = other DNA
ggtgggggtgggtttgctcctgg

SEQ ID NO: 1354 - DNA, 23 bp, synthetic construct
  misc_feature 1..23: note = Description of Artificial Sequence: Synthetic PCR primer
  source 1..23: mol_type = other DNA
tgggatggcagagtcatcaacgt

SEQ ID NO: 1355 - DNA, 22 bp, synthetic construct
  misc_feature 1..22: note = Description of Artificial Sequence: Synthetic PCR primer
  source 1..22: mol_type = other DNA
ggcccaatcggtagaggatgca

SEQ ID NO: 1356 - DNA, 23 bp, synthetic construct
  misc_feature 1..23: note = Description of Artificial Sequence: Synthetic expected off-target sequence
  source 1..23: mol_type = other DNA
gtgggggtagagtttgctccagg

SEQ ID NO: 1357 - DNA, 20 bp, synthetic construct
  misc_feature 1..20: note = Description of Artificial Sequence: Synthetic PCR primer
  source 1..20: mol_type = other DNA
atggggcgctccagtctgtg

SEQ ID NO: 1358 - DNA, 20 bp, synthetic construct
  misc_feature 1..20: note = Description of Artificial Sequence: Synthetic PCR primer
  source 1..20: mol_type = other DNA
tgcacccacacagccagcaa

SEQ ID NO: 1359 - DNA, 23 bp, synthetic construct
  misc_feature 1..23: note = Description of Artificial Sequence: Synthetic expected off-target sequence
  source 1..23: mol_type = other DNA
tagtggagggagcttgctcctgg

SEQ ID NO: 1360 - DNA, 20 bp, synthetic construct
  misc_feature 1..20: note = Description of Artificial Sequence: Synthetic PCR primer
  source 1..20: mol_type = other DNA
ggggagggaggaccagggaa

SEQ ID NO: 1361 - DNA, 20 bp, synthetic construct
  misc_feature 1..20: note = Description of Artificial Sequence: Synthetic PCR primer
  source 1..20: mol_type = other DNA
aattagctgggcgcggtggt

SEQ ID NO: 1362 - DNA, 23 bp, synthetic construct
  misc_feature 1..23: note = Description of Artificial Sequence: Synthetic expected off-target sequence
  source 1..23: mol_type = other DNA
tgctcgggggagtttgcaccagg

SEQ ID NO: 1363 - DNA, 20 bp, synthetic construct
  misc_feature 1..20: note = Description of Artificial Sequence: Synthetic PCR primer
  source 1..20: mol_type = other DNA
atcccgtgcaggaagtcgcc

SEQ ID NO: 1364 - DNA, 20 bp, synthetic construct
  misc_feature 1..20: note = Description of Artificial Sequence: Synthetic PCR primer
  source 1..20: mol_type = other DNA
caggcggccccttgaggaat

SEQ ID NO: 1365 - DNA, 23 bp, synthetic construct
  misc_feature 1..23: note = Description of Artificial Sequence: Synthetic expected off-target sequence
  source 1..23: mol_type = other DNA
tggagaggggagttggctcctgg

SEQ ID NO: 1366 - DNA, 20 bp, synthetic construct
  misc_feature 1..20: note = Description of Artificial Sequence: Synthetic PCR primer
  source 1..20: mol_type = other DNA
ccccaaccctttgctcagcg

SEQ ID NO: 1367 - DNA, 22 bp, synthetic construct
  misc_feature 1..22: note = Description of Artificial Sequence: Synthetic PCR primer
  source 1..22: mol_type = other DNA
tgaggagaacaccacaggcaga

SEQ ID NO: 1368 - DNA, 23 bp, synthetic construct
  misc_feature 1..23: note = Description of Artificial Sequence: Synthetic expected off-target sequence
  source 1..23: mol_type = other DNA
tggtgttgggagtctgctccagg

SEQ ID NO: 1369 - DNA, 20 bp, synthetic construct
  misc_feature 1..20: note = Description of Artificial Sequence: Synthetic PCR primer
  source 1..20: mol_type = other DNA
atcgacgaggagggggcctt

SEQ ID NO: 1370 - DNA, 20 bp, synthetic construct
  misc_feature 1..20: note = Description of Artificial Sequence: Synthetic PCR primer
  source 1..20: mol_type = other DNA
cccctcactcaagcaggccc

SEQ ID NO: 1371 - DNA, 23 bp, synthetic construct
  misc_feature 1..23: note = Description of Artificial Sequence: Synthetic expected off-target sequence
  source 1..23: mol_type = other DNA
ttgggggggcagtttgctcctgg

SEQ ID NO: 1372 - DNA, 20 bp, synthetic construct
  misc_feature 1..20: note = Description of Artificial Sequence: Synthetic PCR primer
  source 1..20: mol_type = other DNA
tgctcaaggggcctgttcca

SEQ ID NO: 1373 - DNA, 20 bp, synthetic construct
  misc_feature 1..20: note = Description of Artificial Sequence: Synthetic PCR primer
  source 1..20: mol_type = other DNA
caggggcagtggcaggagtc

SEQ ID NO: 1374 - DNA, 23 bp, synthetic construct
  misc_feature 1..23: note = Description of Artificial Sequence: Synthetic expected off-target sequence
  source 1..23: mol_type = other DNA
aagtaagggaagtttgctcctgg

SEQ ID NO: 1375 - DNA, 20 bp, synthetic construct
  misc_feature 1..20: note = Description of Artificial Sequence: Synthetic PCR primer
  source 1..20: mol_type = other DNA
tgcctggcacgcagtaggtg

SEQ ID NO: 1376 - DNA, 20 bp, synthetic construct
  misc_feature 1..20: note = Description of Artificial Sequence: Synthetic PCR primer
  source 1..20: mol_type = other DNA
gggaagggggaacaggtgca

SEQ ID NO: 1377 - DNA, 23 bp, synthetic construct
  misc_feature 1..23: note = Description of Artificial Sequence: Synthetic expected off-target sequence
  source 1..23: mol_type = other DNA
agaagaggggattttgctcctgg

SEQ ID NO: 1378 - DNA, 23 bp, synthetic construct
  misc_feature 1..23: note = Description of Artificial Sequence: Synthetic expected off-target sequence
  source 1..23: mol_type = other DNA
atctggggtgattttgctcctgg

SEQ ID NO: 1379 - DNA, 20 bp, synthetic construct
  misc_feature 1..20: note = Description of Artificial Sequence: Synthetic PCR primer
  source 1..20: mol_type = other DNA
acctgggcttgccactaggg

SEQ ID NO: 1380 - DNA, 21 bp, synthetic construct
  misc_feature 1..21: note = Description of Artificial Sequence: Synthetic PCR primer
  source 1..21: mol_type = other DNA
gctgctcgcagttaagcacca

SEQ ID NO: 1381 - DNA, 23 bp, synthetic construct
  misc_feature 1..23: note = Description of Artificial Sequence: Synthetic expected off-target sequence
  source 1..23: mol_type = other DNA
ctctgctgggagtttgctcctgg

SEQ ID NO: 1382 - DNA, 20 bp, synthetic construct
  misc_feature 1..20: note = Description of Artificial Sequence: Synthetic PCR primer
  source 1..20: mol_type = other DNA
gtggccgggctactgctacc

SEQ ID NO: 1383 - DNA, 20 bp, synthetic construct
  misc_feature 1..20: note = Description of Artificial Sequence: Synthetic PCR primer
  source 1..20: mol_type = other DNA
ggttccacaagctgggggca

SEQ ID NO: 1384 - DNA, 23 bp, synthetic construct
  misc_feature 1..23: note = Description of Artificial Sequence: Synthetic expected off-target sequence
  source 1..23: mol_type = other DNA
ctggtgggggagcttgctccagg

SEQ ID NO: 1385 - DNA, 23 bp, synthetic construct
  misc_feature 1..23: note = Description of Artificial Sequence: Synthetic expected off-target sequence
  source 1..23: mol_type = other DNA
ctttcgggggagtttgcgccggg

SEQ ID NO: 1386 - DNA, 20 bp, synthetic construct
  misc_feature 1..20: note = Description of Artificial Sequence: Synthetic PCR primer
  source 1..20: mol_type = other DNA
gcaagaggcggaggagaccc

SEQ ID NO: 1387 - DNA, 23 bp, synthetic construct
  misc_feature 1..23: note = Description of Artificial Sequence: Synthetic PCR primer
  source 1..23: mol_type = other DNA
agagtcatccatttcctgggggc

SEQ ID NO: 1388 - DNA, 23 bp, synthetic construct
  misc_feature 1..23: note = Description of Artificial Sequence: Synthetic expected off-target sequence
  source 1..23: mol_type = other DNA
ctttggggttagtttgctcctgg

SEQ ID NO: 1389 - DNA, 23 bp, synthetic construct
  misc_feature 1..23: note = Description of Artificial Sequence: Synthetic PCR primer
  source 1..23: mol_type = other DNA
ggggtcagtggtgatatccccct

SEQ ID NO: 1390 - DNA, 27 bp, synthetic construct
  misc_feature 1..27: note = Description of Artificial Sequence: Synthetic PCR primer
  source 1..27: mol_type = other DNA
agggaatcctttttccattgcttgttt

SEQ ID NO: 1391 - DNA, 23 bp, synthetic construct
  misc_feature 1..23: note = Description of Artificial Sequence: Synthetic expected off-target sequence
  source 1..23: mol_type = other DNA
gctctggggtagtttgctccagg

SEQ ID NO: 1392 - DNA, 20 bp, synthetic construct
  misc_feature 1..20: note = Description of Artificial Sequence: Synthetic PCR primer
  source 1..20: mol_type = other DNA
agagaggccacgtggagggt

SEQ ID NO: 1393 - DNA, 20 bp, synthetic construct
  misc_feature 1..20: note = Description of Artificial Sequence: Synthetic PCR primer
  source 1..20: mol_type = other DNA
gcctcccctcctccttccca

SEQ ID NO: 1394 - DNA, 23 bp, synthetic construct
  misc_feature 1..23: note = Description of Artificial Sequence: Synthetic expected off-target sequence
  source 1..23: mol_type = other DNA
gtctctcgggagtttgctccggg

SEQ ID NO: 1395 - DNA, 20 bp, synthetic construct
  misc_feature 1..20: note = Description of Artificial Sequence: Synthetic PCR primer
  source 1..20: mol_type = other DNA
gacagtgccttgcgatgcac

SEQ ID NO: 1396 - DNA, 20 bp, synthetic construct
  misc_feature 1..20: note = Description of Artificial Sequence: Synthetic PCR primer
  source 1..20: mol_type = other DNA
tctgaccggtatgcctgacg

SEQ ID NO: 1397 - DNA, 23 bp, synthetic construct
  misc_feature 1..23: note = Description of Artificial Sequence: Synthetic expected off-target sequence
  source 1..23: mol_type = other DNA
tcctgagggcagtttgctccagg

SEQ ID NO: 1398 - DNA, 20 bp, synthetic construct
  misc_feature 1..20: note = Description of Artificial Sequence: Synthetic PCR primer
  source 1..20: mol_type = other DNA
tgtgtgaacgcagcctggct

SEQ ID NO: 1399 - DNA, 24 bp, synthetic construct
  misc_feature 1..24: note = Description of Artificial Sequence: Synthetic PCR primer
  source 1..24: mol_type = other DNA
tggtctagtacttcctccagcctt

SEQ ID NO: 1400 - DNA, 23 bp, synthetic construct
  misc_feature 1..23: note = Description of Artificial Sequence: Synthetic expected off-target sequence
  source 1..23: mol_type = other DNA
tctttgggagagtttgctccagg

SEQ ID NO: 1401 - DNA, 22 bp, synthetic construct
  misc_feature 1..22: note = Description of Artificial Sequence: Synthetic PCR primer
  source 1..22: mol_type = other DNA
ggttctcccttggctcctgtga

SEQ ID NO: 1402 - DNA, 20 bp, synthetic construct
  misc_feature 1..20: note = Description of Artificial Sequence: Synthetic PCR primer
  source 1..20: mol_type = other DNA
cccactgctcctagccctgc

SEQ ID NO: 1403 - DNA, 23 bp, synthetic construct
  misc_feature 1..23: note = Description of Artificial Sequence: Synthetic expected off-target sequence
  source 1..23: mol_type = other DNA
acaactggggagtttgctcctgg

SEQ ID NO: 1404 - DNA, 27 bp, synthetic construct
  misc_feature 1..27: note = Description of Artificial Sequence: Synthetic PCR primer
  source 1..27: mol_type = other DNA
tgaagtcaacaatctaagcttccacct

SEQ ID NO: 1405 - DNA, 27 bp, synthetic construct
  misc_feature 1..27: note = Description of Artificial Sequence: Synthetic PCR primer
  source 1..27: mol_type = other DNA
agctttggtagttggagtctttgaagg

SEQ ID NO: 1406 - DNA, 23 bp, synthetic construct
  misc_feature 1..23: note = Description of Artificial Sequence: Synthetic expected off-target sequence
  source 1..23: mol_type = other DNA
acaaggtggaagtttgctcctgg

SEQ ID NO: 1407 - DNA, 24 bp, synthetic construct
  misc_feature 1..24: note = Description of Artificial Sequence: Synthetic PCR primer
  source 1..24: mol_type = other DNA
tgattgggctgcagttcatgtaca

SEQ ID NO: 1408 - DNA, 20 bp, synthetic construct
  misc_feature 1..20: note = Description of Artificial Sequence: Synthetic PCR primer
  source 1..20: mol_type = other DNA
gcacagcctgcccttggaag

SEQ ID NO: 1409 - DNA, 23 bp, synthetic construct
  misc_feature 1..23: note = Description of Artificial Sequence: Synthetic expected off-target sequence
  source 1..23: mol_type = other DNA
acatagaaggagtttgctccagg

SEQ ID NO: 1410 - DNA, 21 bp, synthetic construct
  misc_feature 1..21: note = Description of Artificial Sequence: Synthetic PCR primer
  source 1..21: mol_type = other DNA
tccatgggcccctctgaaaga

SEQ ID NO: 1411 - DNA, 20 bp, synthetic construct
  misc_feature 1..20: note = Description of Artificial Sequence: Synthetic PCR primer
  source 1..20: mol_type = other DNA
agcggcttctgcttctgcga

SEQ ID NO: 1412 - DNA, 23 bp, synthetic construct
  misc_feature 1..23: note = Description of Artificial Sequence: Synthetic expected off-target sequence
  source 1..23: mol_type = other DNA
agacccagggagtttgctcccgg

SEQ ID NO: 1413 - DNA, 20 bp, synthetic construct
  misc_feature 1..20: note = Description of Artificial Sequence: Synthetic PCR primer
  source 1..20: mol_type = other DNA
gcggttggtggggttgatgc

SEQ ID NO: 1414 - DNA, 20 bp, synthetic construct
  misc_feature 1..20: note = Description of Artificial Sequence: Synthetic PCR primer
  source 1..20: mol_type = other DNA
gagttcctcctcccgccagt

SEQ ID NO: 1415 - DNA, 23 bp, synthetic construct
  misc_feature 1..23: note = Description of Artificial Sequence: Synthetic expected off-target sequence
  source 1..23: mol_type = other DNA
agacccagggagtttgctcccgg

SEQ ID NO: 1416 - DNA, 25 bp, synthetic construct
  misc_feature 1..25: note = Description of Artificial Sequence: Synthetic PCR primer
  source 1..25: mol_type = other DNA
aggcaagattttccagtgtgcaaga

SEQ ID NO: 1417 - DNA, 20 bp, synthetic construct
  misc_feature 1..20: note = Description of Artificial Sequence: Synthetic PCR primer
  source 1..20: mol_type = other DNA
gcttttgcctgggactccgc

SEQ ID NO: 1418 - DNA, 23 bp, synthetic construct
  misc_feature 1..23: note = Description of Artificial Sequence: Synthetic expected off-target sequence
  source 1..23: mol_type = other DNA
cacggaggggtgtttgctcctgg

SEQ ID NO: 1419 - DNA, 20 bp, synthetic construct
  misc_feature 1..20: note = Description of Artificial Sequence: Synthetic PCR primer
  source 1..20: mol_type = other DNA
gctgctggtcgggctctctg

SEQ ID NO: 1420 - DNA, 21 bp, synthetic construct
  misc_feature 1..21: note = Description of Artificial Sequence: Synthetic PCR primer
  source 1..21: mol_type = other DNA
gctctgtcccacttcccctgg

SEQ ID NO: 1421 - DNA, 23 bp, synthetic construct
  misc_feature 1..23: note = Description of Artificial Sequence: Synthetic expected off-target sequence
  source 1..23: mol_type = other DNA
cagagcttggagtttgctccagg

SEQ ID NO: 1422 - DNA, 20 bp, synthetic construct
  misc_feature 1..20: note = Description of Artificial Sequence: Synthetic PCR primer
  source 1..20: mol_type = other DNA
gctgcgaggcttccgtgaga

SEQ ID NO: 1423 - DNA, 21 bp, synthetic construct
  misc_feature 1..21: note = Description of Artificial Sequence: Synthetic PCR primer
  source 1..21: mol_type = other DNA
cgcccctagagctaagggggt

SEQ ID NO: 1424 - DNA, 23 bp, synthetic construct
  misc_feature 1..23: note = Description of Artificial Sequence: Synthetic expected off-target sequence
  source 1..23: mol_type = other DNA
ctattgatggagtttgctcctgg

SEQ ID NO: 1425 - DNA, 20 bp, synthetic construct
  misc_feature 1..20: note = Description of Artificial Sequence: Synthetic PCR primer
  source 1..20: mol_type = other DNA
ccaggagcctgagagctgcc

SEQ ID NO: 1426 - DNA, 21 bp, synthetic construct
  misc_feature 1..21: note = Description of Artificial Sequence: Synthetic PCR primer
  source 1..21: mol_type = other DNA
agggctaggactgcagtgagc

SEQ ID NO: 1427 - DNA, 23 bp, synthetic construct
  misc_feature 1..23: note = Description of Artificial Sequence: Synthetic expected off-target sequence
  source 1..23: mol_type = other DNA
ctttctagggagtttgctcctgg

SEQ ID NO: 1428 - DNA, 20 bp, synthetic construct
  misc_feature 1..20: note = Description of Artificial Sequence: Synthetic PCR primer
  source 1..20: mol_type = other DNA
ctgtgctcagcctgggtgct

SEQ ID NO: 1429 - DNA, 21 bp, synthetic construct
  misc_feature 1..21: note = Description of Artificial Sequence: Synthetic PCR primer
  source 1..21: mol_type = other DNA
gcctggggctgtgagtagttt

SEQ ID NO: 1430 - DNA, 23 bp, synthetic construct
  misc_feature 1..23: note = Description of Artificial Sequence: Synthetic expected off-target sequence
  source 1..23: mol_type = other DNA
gccatgctggagtttgctccagg

SEQ ID NO: 1431 - DNA, 20 bp, synthetic construct
  misc_feature 1..20: note = Description of Artificial Sequence: Synthetic PCR primer
  source 1..20: mol_type = other DNA
agctcgcgccagatctgtgg

SEQ ID NO: 1432 - DNA, 20 bp, synthetic construct
  misc_feature 1..20: note = Description of Artificial Sequence: Synthetic PCR primer
  source 1..20: mol_type = other DNA
acttggcaggctgaggcagg

SEQ ID NO: 1433-1435 - skipped (3 entries)

SEQ ID NO: 1436 - DNA, 23 bp, synthetic construct
  misc_feature 1..23: note = Description of Artificial Sequence: Synthetic expected off-target sequence
  source 1..23: mol_type = other DNA
gaccccctccaccccgcctccgg

SEQ ID NO: 1437 - DNA, 22 bp, synthetic construct
  misc_feature 1..22: note = Description of Artificial Sequence: Synthetic PCR primer
  source 1..22: mol_type = other DNA
agagaagtcgaggaagagagag

SEQ ID NO: 1438 - DNA, 22 bp, synthetic construct
  misc_feature 1..22: note = Description of Artificial Sequence: Synthetic PCR primer
  source 1..22: mol_type = other DNA
cagcagaaagttcatggtttcg

SEQ ID NO: 1439 - DNA, 23 bp, synthetic construct
  misc_feature 1..23: note = Description of Artificial Sequence: Synthetic expected off-target sequence
  source 1..23: mol_type = other DNA
gaccccccccaccccgcccccgg

SEQ ID NO: 1440 - DNA, 22 bp, synthetic construct
  misc_feature 1..22: note = Description of Artificial Sequence: Synthetic PCR primer
  source 1..22: mol_type = other DNA
tggacagctgcagtactccctg

SEQ ID NO: 1441 - DNA, 24 bp, synthetic construct
  misc_feature 1..24: note = Description of Artificial Sequence: Synthetic PCR primer
  source 1..24: mol_type = other DNA
actgatcgatgatggcctatgggt

SEQ ID NO: 1442 - DNA, 23 bp, synthetic construct
  misc_feature 1..23: note = Description of Artificial Sequence: Synthetic expected off-target sequence
  source 1..23: mol_type = other DNA
gggcccctccaccccgcctctgg

SEQ ID NO: 1443 - DNA, 20 bp, synthetic construct
  misc_feature 1..20: note = Description of Artificial Sequence: Synthetic PCR primer
  source 1..20: mol_type = other DNA
caagatgtgcacttgggcta

SEQ ID NO: 1444 - DNA, 20 bp, synthetic construct
  misc_feature 1..20: note = Description of Artificial Sequence: Synthetic PCR primer
  source 1..20: mol_type = other DNA
gcagcctattgtctcctggt

SEQ ID NO: 1445 - DNA, 23 bp, synthetic construct
  misc_feature 1..23: note = Description of Artificial Sequence: Synthetic expected off-target sequence
  source 1..23: mol_type = other DNA
aaccccatccacccggcctcagg

SEQ ID NO: 1446 - DNA, 20 bp, synthetic construct
  misc_feature 1..20: note = Description of Artificial Sequence: Synthetic PCR primer
  source 1..20: mol_type = other DNA
gtccagtgcctgaccctggc

SEQ ID NO: 1447 - DNA, 21 bp, synthetic construct
  misc_feature 1..21: note = Description of Artificial Sequence: Synthetic PCR primer
  source 1..21: mol_type = other DNA
agcatcatgcctccagcttca

SEQ ID NO: 1448 - DNA, 23 bp, synthetic construct
  misc_feature 1..23: note = Description of Artificial Sequence: Synthetic expected off-target sequence
  source 1..23: mol_type = other DNA
caccccctcaacaccgcctcagg

SEQ ID NO: 1449 - DNA, 20 bp, synthetic construct
  misc_feature 1..20: note = Description of Artificial Sequence: Synthetic PCR primer
  source 1..20: mol_type = other DNA
gctcccgatcctctgccacc

SEQ ID NO: 1450 - DNA, 20 bp, synthetic construct
  misc_feature 1..20: note = Description of Artificial Sequence: Synthetic PCR primer
  source 1..20: mol_type = other DNA
gcagctcccaccaccctcag

SEQ ID NO: 1451 - DNA, 23 bp, synthetic construct
  misc_feature 1..23: note = Description of Artificial Sequence: Synthetic expected off-target sequence
  source 1..23: mol_type = other DNA
caccccctcccctccgcctcagg

SEQ ID NO: 1452 - DNA, 20 bp, synthetic construct
  misc_feature 1..20: note = Description of Artificial Sequence: Synthetic PCR primer
  source 1..20: mol_type = other DNA
ggggacaggcaggcaaggag

SEQ ID NO: 1453 - DNA, 20 bp, synthetic construct
  misc_feature 1..20: note = Description of Artificial Sequence: Synthetic PCR primer
  source 1..20: mol_type = other DNA
gtgcgtgtccgttcacccct

SEQ ID NO: 1454 - DNA, 23 bp, synthetic construct
  misc_feature 1..23: note = Description of Artificial Sequence: Synthetic expected off-target sequence
  source 1..23: mol_type = other DNA
ctacccctccaccccgcctccgg

SEQ ID NO: 1455 - DNA, 20 bp, synthetic construct
  misc_feature 1..20: note = Description of Artificial Sequence: Synthetic PCR primer
  source 1..20: mol_type = other DNA
aaggggctgctgggtaggac

SEQ ID NO: 1456 - DNA, 20 bp, synthetic construct
  misc_feature 1..20: note = Description of Artificial Sequence: Synthetic PCR primer
  source 1..20: mol_type = other DNA
cgtgattcgagttcctggca

SEQ ID NO: 1457 - DNA, 23 bp, synthetic construct
  misc_feature 1..23: note = Description of Artificial Sequence: Synthetic expected off-target sequence
  source 1..23: mol_type = other DNA
gacccgccccgccccgcctctgg

SEQ ID NO: 1458 - DNA, 20 bp, synthetic construct
  misc_feature 1..20: note = Description of Artificial Sequence: Synthetic PCR primer
  source 1..20: mol_type = other DNA
gaccctcaggaagctgggag

SEQ ID NO: 1459 - DNA, 20 bp, synthetic construct
  misc_feature 1..20: note = Description of Artificial Sequence: Synthetic PCR primer
  source 1..20: mol_type = other DNA
ctgcgagatgccccaaatcg

SEQ ID NO: 1460 - DNA, 23 bp, synthetic construct
  misc_feature 1..23: note = Description of Artificial Sequence: Synthetic expected off-target sequence
  source 1..23: mol_type = other DNA
gatcgactccaccccgcctctgg

SEQ ID NO: 1461 - DNA, 18 bp, synthetic construct
  misc_feature 1..18: note = Description of Artificial Sequence: Synthetic PCR primer
  source 1..18: mol_type = other DNA
ccgcggcgctctgctaga

SEQ ID NO: 1462 - DNA, 20 bp, synthetic construct
  misc_feature 1..20: note = Description of Artificial Sequence: Synthetic PCR primer
  source 1..20: mol_type = other DNA
tgctgggattacaggcgcga

SEQ ID NO: 1463 - DNA, 23 bp, synthetic construct
  misc_feature 1..23: note = Description of Artificial Sequence: Synthetic expected off-target sequence
  source 1..23: mol_type = other DNA
gcccccacccaccccgcctctgg

SEQ ID NO: 1464 - DNA, 20 bp, synthetic construct
  misc_feature 1..20: note = Description of Artificial Sequence: Synthetic PCR primer
  source 1..20: mol_type = other DNA
ccaggtggtgtcagcggagg

SEQ ID NO: 1465 - DNA, 21 bp, synthetic construct
  misc_feature 1..21: note = Description of Artificial Sequence: Synthetic PCR primer
  source 1..21: mol_type = other DNA
tgcctggccctctctgagtct

SEQ ID NO: 1466 - DNA, 23 bp, synthetic construct
  misc_feature 1..23: note = Description of Artificial Sequence: Synthetic expected off-target sequence
  source 1..23: mol_type = other DNA
gccccgctcctccccgcctccgg

SEQ ID NO: 1467 - DNA, 20 bp, synthetic construct
  misc_feature 1..20: note = Description of Artificial Sequence: Synthetic PCR primer
  source 1..20: mol_type = other DNA
cgactccacggcgtctcagg

SEQ ID NO: 1468 - DNA, 20 bp, synthetic construct
  misc_feature 1..20: note = Description of Artificial Sequence: Synthetic PCR primer
  source 1..20: mol_type = other DNA
cagcgcagtccagcccgatg

SEQ ID NO: 1469 - DNA, 23 bp, synthetic construct
  misc_feature 1..23: note = Description of Artificial Sequence: Synthetic expected off-target sequence
  source 1..23: mol_type = other DNA
ggccccctccaccaggcctcagg

SEQ ID NO: 1470 - DNA, 20 bp, synthetic construct
  misc_feature 1..20: note = Description of Artificial Sequence: Synthetic PCR primer
  source 1..20: mol_type = other DNA
cttccctcccccagcaccac

SEQ ID NO: 1471 - DNA, 24 bp, synthetic construct
  misc_feature 1..24: note = Description of Artificial Sequence: Synthetic PCR primer
  source 1..24: mol_type = other DNA
gctacaggttgcacagtgagaggt

SEQ ID NO: 1472 - DNA, 23 bp, synthetic construct
  misc_feature 1..23: note = Description of Artificial Sequence: Synthetic expected off-target sequence
  source 1..23: mol_type = other DNA
ggccccctcctcctcgcctctgg

SEQ ID NO: 1473 - DNA, 20 bp, synthetic construct
  misc_feature 1..20: note = Description of Artificial Sequence: Synthetic PCR primer
  source 1..20: mol_type = other DNA
ccccggggagtctgtcctga

SEQ ID NO: 1474 - DNA, 21 bp, synthetic construct
  misc_feature 1..21: note = Description of Artificial Sequence: Synthetic PCR primer
  source 1..21: mol_type = other DNA
cccagccgttccaggtcttcc

SEQ ID NO: 1475 - DNA, 23 bp, synthetic construct
  misc_feature 1..23: note = Description of Artificial Sequence: Synthetic expected off-target sequence
  source 1..23: mol_type = other DNA
ggcgccctccaccctgcctcggg

SEQ ID NO: 1476 - DNA, 20 bp, synthetic construct
  misc_feature 1..20: note = Description of Artificial Sequence: Synthetic PCR primer
  source 1..20: mol_type = other DNA
gaagcgcgaaaacccggctc

SEQ ID NO: 1477 - DNA, 20 bp, synthetic construct
  misc_feature 1..20: note = Description of Artificial Sequence: Synthetic PCR primer
  source 1..20: mol_type = other DNA
tccagggtccttctcggccc

SEQ ID NO: 1478 - DNA, 23 bp, synthetic construct
  misc_feature 1..23: note = Description of Artificial Sequence: Synthetic expected off-target sequence
  source 1..23: mol_type = other DNA
gtcctccaccaccccgcctctgg

SEQ ID NO: 1479 - DNA, 20 bp, synthetic construct
  misc_feature 1..20: note = Description of Artificial Sequence: Synthetic PCR primer
  source 1..20: mol_type = other DNA
agggtggtcagggaggcctt

SEQ ID NO: 1480 - DNA, 20 bp, synthetic construct
  misc_feature 1..20: note = Description of Artificial Sequence: Synthetic PCR primer
  source 1..20: mol_type = other DNA
catggggctcggacctcgtc

SEQ ID NO: 1481 - DNA, 23 bp, synthetic construct
  misc_feature 1..23: note = Description of Artificial Sequence: Synthetic expected off-target sequence
  source 1..23: mol_type = other DNA
taccccccacaccccgcctctgg

SEQ ID NO: 1482 - DNA, 20 bp, synthetic construct
  misc_feature 1..20: note = Description of Artificial Sequence: Synthetic PCR primer
  source 1..20: mol_type = other DNA
gggaagaggcagggctgtcg

SEQ ID NO: 1483 - DNA, 20 bp, synthetic construct
  misc_feature 1..20: note = Description of Artificial Sequence: Synthetic PCR primer
  source 1..20: mol_type = other DNA
tgccaggaaggaagctggcc

SEQ ID NO: 1484 - DNA, 23 bp, synthetic construct
  misc_feature 1..23: note = Description of Artificial Sequence: Synthetic expected off-target sequence
  source 1..23: mol_type = other DNA
aacccattccaccctgcctcagg

SEQ ID NO: 1485 - DNA, 20 bp, synthetic construct
  misc_feature 1..20: note = Description of Artificial Sequence: Synthetic PCR primer
  source 1..20: mol_type = other DNA
gagtgacgatgagccccggg

SEQ ID NO: 1486 - DNA, 20 bp, synthetic construct
  misc_feature 1..20: note = Description of Artificial Sequence: Synthetic PCR primer
  source 1..20: mol_type = other DNA
cccttagctgcagtcgcccc

SEQ ID NO: 1487 - DNA, 23 bp, synthetic construct
  misc_feature 1..23: note = Description of Artificial Sequence: Synthetic expected off-target sequence
  source 1..23: mol_type = other DNA
acacccccccaccccgcctcagg

SEQ ID NO: 1488 - DNA, 20 bp, synthetic construct
  misc_feature 1..20: note = Description of Artificial Sequence: Synthetic PCR primer
  source 1..20: mol_type = other DNA
cccatgaggggtttgagtgc

SEQ ID NO: 1489 - DNA, 20 bp, synthetic construct
  misc_feature 1..20: note = Description of Artificial Sequence: Synthetic PCR primer
  source 1..20: mol_type = other DNA
tgaagatgggcagtttgggg

SEQ ID NO: 1490 - DNA, 23 bp, synthetic construct
  misc_feature 1..23: note = Description of Artificial Sequence: Synthetic expected off-target sequence
  source 1..23: mol_type = other DNA
agcccccacctccccgcctcggg

SEQ ID NO: 1491 - DNA, 20 bp, synthetic construct
  misc_feature 1..20: note = Description of Artificial Sequence: Synthetic PCR primer
  source 1..20: mol_type = other DNA
cacctggggcatctgggtgg

SEQ ID NO: 1492 - DNA, 20 bp, synthetic construct
  misc_feature 1..20: note = Description of Artificial Sequence: Synthetic PCR primer
  source 1..20: mol_type = other DNA
actggggttggggaggggat

SEQ ID NO: 1493 - DNA, 23 bp, synthetic construct
  misc_feature 1..23: note = Description of Artificial Sequence: Synthetic expected off-target sequence
  source 1..23: mol_type = other DNA
attcccccccaccccgcctcagg

SEQ ID NO: 1494 - DNA, 20 bp, synthetic construct
  misc_feature 1..20: note = Description of Artificial Sequence: Synthetic PCR primer
  source 1..20: mol_type = other DNA
tcatgatccccaaaagggct

SEQ ID NO: 1495 - DNA, 22 bp, synthetic construct
  misc_feature 1..22: note = Description of Artificial Sequence: Synthetic PCR primer
  source 1..22: mol_type = other DNA
ccatttgtgctgatctgtgggt

SEQ ID NO: 1496 - DNA, 23 bp, synthetic construct
  misc_feature 1..23: note = Description of Artificial Sequence: Synthetic expected off-target sequence
  source 1..23: mol_type = other DNA
ccccacccccaccccgcctcagg

SEQ ID NO: 1497 - DNA, 21 bp, synthetic construct
  misc_feature 1..21: note = Description of Artificial Sequence: Synthetic PCR primer
  source 1..21: mol_type = other DNA
tggtgcccagaatagtggcca

SEQ ID NO: 1498 - DNA, 22 bp, synthetic construct
  misc_feature 1..22: note = Description of Artificial Sequence: Synthetic PCR primer
  source 1..22: mol_type = other DNA
aggaaatgtgttgtgccagggc

SEQ ID NO: 1499 - DNA, 23 bp, synthetic construct
  misc_feature 1..23: note = Description of Artificial Sequence: Synthetic expected off-target sequence
  source 1..23: mol_type = other DNA
cccccccaccaccccgccccggg

SEQ ID NO: 1500 - DNA, 20 bp, synthetic construct
  misc_feature 1..20: note = Description of Artificial Sequence: Synthetic PCR primer
  source 1..20: mol_type = other DNA
gcctcagacaaccctgcccc

SEQ ID NO: 1501 - DNA, 27 bp, synthetic construct
  misc_feature 1..27: note = Description of Artificial Sequence: Synthetic PCR primer
  source 1..27: mol_type = other DNA
gccaagtgttactcatcaagaaagtgg

SEQ ID NO: 1502 - DNA, 23 bp, synthetic construct
  misc_feature 1..23: note = Description of Artificial Sequence: Synthetic expected off-target sequence
  source 1..23: mol_type = other DNA
cccccccccccccccgcctcagg

SEQ ID NO: 1503 - DNA, 22 bp, synthetic construct
  misc_feature 1..22: note = Description of Artificial Sequence: Synthetic PCR primer
  source 1..22: mol_type = other DNA
gccgggacaagactgagttggg

SEQ ID NO: 1504 - DNA, 20 bp, synthetic construct
  misc_feature 1..20: note = Description of Artificial Sequence: Synthetic PCR primer
  source 1..20: mol_type = other DNA
tcccgaactcccgcaaaacg

SEQ ID NO: 1505 - DNA, 23 bp, synthetic construct
  misc_feature 1..23: note = Description of Artificial Sequence: Synthetic expected off-target sequence
  source 1..23: mol_type = other DNA
cgccctccccaccccgcctccgg

SEQ ID NO: 1506 - DNA, 20 bp, synthetic construct
  misc_feature 1..20: note = Description of Artificial Sequence: Synthetic PCR primer
  source 1..20: mol_type = other DNA
tgctgcaggtggttccggag

SEQ ID NO: 1507 - DNA, 20 bp, synthetic construct
  misc_feature 1..20: note = Description of Artificial Sequence: Synthetic PCR primer
  source 1..20: mol_type = other DNA
ctggaaccgcatcctccgca

SEQ ID NO: 1508 - DNA, 23 bp, synthetic construct
  misc_feature 1..23: note = Description of Artificial Sequence: Synthetic expected off-target sequence
  source 1..23: mol_type = other DNA
ctccccacccaccccgcctcagg

SEQ ID NO: 1509 - DNA, 21 bp, synthetic construct
  misc_feature 1..21: note = Description of Artificial Sequence: Synthetic PCR primer
  source 1..21: mol_type = other DNA
acactggtccaggtcccgtct

SEQ ID NO: 1510 - DNA, 20 bp, synthetic construct
  misc_feature 1..20: note = Description of Artificial Sequence: Synthetic PCR primer
  source 1..20: mol_type = other DNA
ggctgtgccttccgatggaa

SEQ ID NO: 1511 - DNA, 23 bp, synthetic construct
  misc_feature 1..23: note = Description of Artificial Sequence: Synthetic expected off-target sequence
  source 1..23: mol_type = other DNA
ctctccccccaccccgcctctgg

SEQ ID NO: 1512 - DNA, 20 bp, synthetic construct
  misc_feature 1..20: note = Description of Artificial Sequence: Synthetic PCR primer
  source 1..20: mol_type = other DNA
atcgcgcccaaagcacaggt

SEQ ID NO: 1513 - DNA, 26 bp, synthetic construct
  misc_feature 1..26: note = Description of Artificial Sequence: Synthetic PCR primer
  source 1..26: mol_type = other DNA
aggcttctggaaaagtcctcaatgca

SEQ ID NO: 1514 - DNA, 23 bp, synthetic construct
  misc_feature 1..23: note = Description of Artificial Sequence: Synthetic expected off-target sequence
  source 1..23: mol_type = other DNA
gcctctctgcaccccgcctcagg

SEQ ID NO: 1515 - DNA, 23 bp, synthetic construct
  misc_feature 1..23: note = Description of Artificial Sequence: Synthetic expected off-target sequence
  source 1..23: mol_type = other DNA
gtcactccccaccccgcctctgg

SEQ ID NO: 1516 - DNA, 22 bp, synthetic construct
  misc_feature 1..22: note = Description of Artificial Sequence: Synthetic PCR primer
  source 1..22: mol_type = other DNA
ccctcatggtggtcttacggca

SEQ ID NO: 1517 - DNA, 23 bp, synthetic construct
  misc_feature 1..23: note = Description of Artificial Sequence: Synthetic PCR primer
  source 1..23: mol_type = other DNA
agccacacatctttctggtaggg

SEQ ID NO: 1518 - DNA, 23 bp, synthetic construct
  misc_feature 1..23: note = Description of Artificial Sequence: Synthetic expected off-target sequence
  source 1..23: mol_type = other DNA
tgccccctccccccagcctctgg

SEQ ID NO: 1519 - DNA, 20 bp, synthetic construct
  misc_feature 1..20: note = Description of Artificial Sequence: Synthetic PCR primer
  source 1..20: mol_type = other DNA
tgcgtcgctcatgctgggag

SEQ ID NO: 1520 - DNA, 21 bp, synthetic construct
  misc_feature 1..21: note = Description of Artificial Sequence: Synthetic PCR primer
  source 1..21: mol_type = other DNA
agggtggggtgtactggctca

SEQ ID NO: 1521 - DNA, 23 bp, synthetic construct
  misc_feature 1..23: note = Description of Artificial Sequence: Synthetic expected off-target sequence
  source 1..23: mol_type = other DNA
tgcccctcccaccccgcctctgg

SEQ ID NO: 1522 - DNA, 20 bp, synthetic construct
  misc_feature 1..20: note = Description of Artificial Sequence: Synthetic PCR primer
  source 1..20: mol_type = other DNA
gagctgagacggcaccactg

SEQ ID NO: 1523 - DNA, 20 bp, synthetic construct
  misc_feature 1..20: note = Description of Artificial Sequence: Synthetic PCR primer
  source 1..20: mol_type = other DNA
tggccttgaactcttgggct

SEQ ID NO: 1524 - DNA, 23 bp, synthetic construct
  misc_feature 1..23: note = Description of Artificial Sequence: Synthetic expected off-target sequence
  source 1..23: mol_type = other DNA
ttccccttccacccagcctctgg

SEQ ID NO: 1525 - DNA, 23 bp, synthetic construct
  misc_feature 1..23: note = Description of Artificial Sequence: Synthetic expected off-target sequence
  source 1..23: mol_type = other DNA
ttctccctcctccccgcctcggg

SEQ ID NO: 1526 - DNA, 20 bp, synthetic construct
  misc_feature 1..20: note = Description of Artificial Sequence: Synthetic PCR primer
  source 1..20: mol_type = other DNA
agtgagagtggcacgaacca

SEQ ID NO: 1527 - DNA, 20 bp, synthetic construct
  misc_feature 1..20: note = Description of Artificial Sequence: Synthetic PCR primer
  source 1..20: mol_type = other DNA
cagtaggtggtcccttccgc

SEQ ID NO: 1528 - DNA, 23 bp, synthetic construct
  misc_feature 1..23: note = Description of Artificial Sequence: Synthetic expected off-target sequence
  source 1..23: mol_type = other DNA
accctcgcccaccccgcctcagg

SEQ ID NO: 1529 - DNA, 23 bp, synthetic construct
  misc_feature 1..23: note = Description of Artificial Sequence: Synthetic expected off-target sequence
  source 1..23: mol_type = other DNA
agccaaccccaccccgcctctgg

SEQ ID NO: 1530 - DNA, 20 bp, synthetic construct
  misc_feature 1..20: note = Description of Artificial Sequence: Synthetic PCR primer
  source 1..20: mol_type = other DNA
gggagaaccttgtccagcct

SEQ ID NO: 1531 - DNA, 20 bp, synthetic construct
  misc_feature 1..20: note = Description of Artificial Sequence: Synthetic PCR primer
  source 1..20: mol_type = other DNA
aagccgaaaagctgggcaaa

SEQ ID NO: 1532 - DNA, 23 bp, synthetic construct
  misc_feature 1..23: note = Description of Artificial Sequence: Synthetic expected off-target sequence
  source 1..23: mol_type = other DNA
aggcccccacaccccgcctcagg

SEQ ID NO: 1533 - DNA, 20 bp, synthetic construct
  misc_feature 1..20: note = Description of Artificial Sequence: Synthetic PCR primer
  source 1..20: mol_type = other DNA
cttcccagtgtggcccgtcc

SEQ ID NO: 1534 - DNA, 20 bp, synthetic construct
  misc_feature 1..20: note = Description of Artificial Sequence: Synthetic PCR primer
  source 1..20: mol_type = other DNA
acacagtcagagctccgccg

SEQ ID NO: 1535 - DNA, 23 bp, synthetic construct
  misc_feature 1..23: note = Description of Artificial Sequence: Synthetic expected off-target sequence
  source 1..23: mol_type = other DNA
aggcccccccgccccgcctcagg

SEQ ID NO: 1536 - DNA, 23 bp, synthetic construct
  misc_feature 1..23: note = Description of Artificial Sequence: Synthetic expected off-target sequence
  source 1..23: mol_type = other DNA
atctgccaccaccccgcctccgg

SEQ ID NO: 1537 - DNA, 20 bp, synthetic construct
  misc_feature 1..20: note = Description of Artificial Sequence: Synthetic PCR primer
  source 1..20: mol_type = other DNA
ctgagagggggagggggagg

SEQ ID NO: 1538 - DNA, 21 bp, synthetic construct
  misc_feature 1..21: note = Description of Artificial Sequence: Synthetic PCR primer
  source 1..21: mol_type = other DNA
tcgactggtcttgtcctccca

SEQ ID NO: 1539 - DNA, 23 bp, synthetic construct
  misc_feature 1..23: note = Description of Artificial Sequence: Synthetic expected off-target sequence
  source 1..23: mol_type = other DNA
catcttccccaccccgcctctgg

SEQ ID NO: 1540 - DNA, 20 bp, synthetic construct
  misc_feature 1..20: note = Description of Artificial Sequence: Synthetic PCR primer
  source 1..20: mol_type = other DNA
cagcctgctgcatcggaaaa

SEQ ID NO: 1541 - DNA, 21 bp, synthetic construct
  misc_feature 1..21: note = Description of Artificial Sequence: Synthetic PCR primer
  source 1..21: mol_type = other DNA
tgcagccaagagaaaaagcct

SEQ ID NO: 1542 - DNA, 23 bp, synthetic construct
  misc_feature 1..23: note = Description of Artificial Sequence: Synthetic expected off-target sequence
  source 1..23: mol_type = other DNA
ctttccctccacccagcctctgg

SEQ ID NO: 1543 - DNA, 20 bp, synthetic construct
  misc_feature 1..20: note = Description of Artificial Sequence: Synthetic PCR primer
  source 1..20: mol_type = other DNA
tccctctgacccggaaccca

SEQ ID NO: 1544 - DNA, 21 bp, synthetic construct
  misc_feature 1..21: note = Description of Artificial Sequence: Synthetic PCR primer
  source 1..21: mol_type = other DNA
acccgacttcctccccattgc

SEQ ID NO: 1545 - DNA, 23 bp, synthetic construct
  misc_feature 1..23: note = Description of Artificial Sequence: Synthetic expected off-target sequence
  source 1..23: mol_type = other DNA
gtcgaggtccaccccgcctcagg

SEQ ID NO: 1546 - DNA, 20 bp, synthetic construct
  misc_feature 1..20: note = Description of Artificial Sequence: Synthetic PCR primer
  source 1..20: mol_type = other DNA
tgggggttgcgtgcttgtca

SEQ ID NO: 1547 - DNA, 20 bp, synthetic construct
  misc_feature 1..20: note = Description of Artificial Sequence: Synthetic PCR primer
  source 1..20: mol_type = other DNA
gccaggaggacaccaggacc

SEQ ID NO: 1548 - DNA, 23 bp, synthetic construct
  misc_feature 1..23: note = Description of Artificial Sequence: Synthetic expected off-target sequence
  source 1..23: mol_type = other DNA
gtcgaggtccaccccgcctcagg

SEQ ID NO: 1549 - DNA, 20 bp, synthetic construct
  misc_feature 1..20: note = Description of Artificial Sequence: Synthetic PCR primer
  source 1..20: mol_type = other DNA
atcaggtgccaggaggacac

SEQ ID NO: 1550 - DNA, 20 bp, synthetic construct
  misc_feature 1..20: note = Description of Artificial Sequence: Synthetic PCR primer
  source 1..20: mol_type = other DNA
ggcctgagagtggagagtgg

SEQ ID NO: 1551 - DNA, 23 bp, synthetic construct
  misc_feature 1..23: note = Description of Artificial Sequence: Synthetic expected off-target sequence
  source 1..23: mol_type = other DNA
tcagacctccaccccgcctcagg

SEQ ID NO: 1552 - DNA, 23 bp, synthetic construct
  misc_feature 1..23: note = Description of Artificial Sequence: Synthetic expected off-target sequence
  source 1..23: mol_type = other DNA
tgcaacctcctccccgcctcggg

SEQ ID NO: 1553 - DNA, 24 bp, synthetic construct
  misc_feature 1..24: note = Description of Artificial Sequence: Synthetic PCR primer
  source 1..24: mol_type = other DNA
tgagccacatgaatcaaggcctcc

SEQ ID NO: 1554 - DNA, 26 bp, synthetic construct
  misc_feature 1..26: note = Description of Artificial Sequence: Synthetic PCR primer
  source 1..26: mol_type = other DNA
acctctccaagtctcagtaactctct

SEQ ID NO: 1555 - DNA, 23 bp, synthetic construct
  misc_feature 1..23: note = Description of Artificial Sequence: Synthetic expected off-target sequence
  source 1..23: mol_type = other DNA
accagtctgcaccccgcctctgg

SEQ ID NO: 1556 - DNA, 20 bp, synthetic construct
  misc_feature 1..20: note = Description of Artificial Sequence: Synthetic PCR primer
  source 1..20: mol_type = other DNA
ggtccctctgtgcagtggaa

SEQ ID NO: 1557 - DNA, 20 bp, synthetic construct
  misc_feature 1..20: note = Description of Artificial Sequence: Synthetic PCR primer
  source 1..20: mol_type = other DNA
ctttggtggacctgcacagc

SEQ ID NO: 1558 - DNA, 23 bp, synthetic construct
  misc_feature 1..23: note = Description of Artificial Sequence: Synthetic expected off-target sequence
  source 1..23: mol_type = other DNA
actacccacctccccgcctcagg

SEQ ID NO: 1559 - DNA, 20 bp, synthetic construct
  misc_feature 1..20: note = Description of Artificial Sequence: Synthetic PCR primer
  source 1..20: mol_type = other DNA
gcgaggctgctgacttccct

SEQ ID NO: 1560 - DNA, 23 bp, synthetic construct
  misc_feature 1..23: note = Description of Artificial Sequence: Synthetic PCR primer
  source 1..23: mol_type = other DNA
gctgggactacagacatgtgcca

SEQ ID NO: 1561 - DNA, 23 bp, synthetic construct
  misc_feature 1..23: note = Description of Artificial Sequence: Synthetic expected off-target sequence
  source 1..23: mol_type = other DNA
atttcccccccccccgcctcagg

SEQ ID NO: 1562 - DNA, 20 bp, synthetic construct
  misc_feature 1..20: note = Description of Artificial Sequence: Synthetic PCR primer
  source 1..20: mol_type = other DNA
attgcaggcgtgtccaggca

SEQ ID NO: 1563 - DNA, 23 bp, synthetic construct
  misc_feature 1..23: note = Description of Artificial Sequence: Synthetic PCR primer
  source 1..23: mol_type = other DNA
aaatcctgcatggtgatgggagt

SEQ ID NO: 1564 - DNA, 23 bp, synthetic construct
  misc_feature 1..23: note = Description of Artificial Sequence: Synthetic expected off-target sequence
  source 1..23: mol_type = other DNA
ccaccatcccaccccgcctctgg

SEQ ID NO: 1565 - DNA, 27 bp, synthetic construct
  misc_feature 1..27: note = Description of Artificial Sequence: Synthetic PCR primer
  source 1..27: mol_type = other DNA
tgctctgccatttatgtcctatgaact

SEQ ID NO: 1566 - DNA, 24 bp, synthetic construct
  misc_feature 1..24: note = Description of Artificial Sequence: Synthetic PCR primer
  source 1..24: mol_type = other DNA
acagcctcttctccatgactgagc

SEQ ID NO: 1567 - DNA, 23 bp, synthetic construct
  misc_feature 1..23: note = Description of Artificial Sequence: Synthetic expected off-target sequence
  source 1..23: mol_type = other DNA
cccaagccccaccccgcctcggg

SEQ ID NO: 1568 - DNA, 20 bp, synthetic construct
  misc_feature 1..20: note = Description of Artificial Sequence: Synthetic PCR primer
  source 1..20: mol_type = other DNA
tccgcccaaacaggaggcag

SEQ ID NO: 1569 - DNA, 20 bp, synthetic construct
  misc_feature 1..20: note = Description of Artificial Sequence: Synthetic PCR primer
  source 1..20: mol_type = other DNA
gcggtggggaagccattgag

SEQ ID NO: 1570 - DNA, 23 bp, synthetic construct
  misc_feature 1..23: note = Description of Artificial Sequence: Synthetic expected off-target sequence
  source 1..23: mol_type = other DNA
ccgcgcttccgccccgcctctgg

SEQ ID NO: 1571 - DNA, 20 bp, synthetic construct
  misc_feature 1..20: note = Description of Artificial Sequence: Synthetic PCR primer
  source 1..20: mol_type = other DNA
gggggtctggctcacctgga

SEQ ID NO: 1572 - DNA, 20 bp, synthetic construct
  misc_feature 1..20: note = Description of Artificial Sequence: Synthetic PCR primer
  source 1..20: mol_type = other DNA
cctgtcgggagagtgcctgc

SEQ ID NO: 1573 - DNA, 23 bp, synthetic construct
  misc_feature 1..23: note = Description of Artificial Sequence: Synthetic expected off-target sequence
  source 1..23: mol_type = other DNA
cctgccatgcaccccgcctcagg

SEQ ID NO: 1574 - DNA, 27 bp, synthetic construct
  misc_feature 1..27: note = Description of Artificial Sequence: Synthetic PCR primer
  source 1..27: mol_type = other DNA
tcctggttcatttgctagaactctgga

SEQ ID NO: 1575 - DNA, 21 bp, synthetic construct
  misc_feature 1..21: note = Description of Artificial Sequence: Synthetic PCR primer
  source 1..21: mol_type = other DNA
actccagatgcaaccagggct

SEQ ID NO: 1576 - DNA, 23 bp, synthetic construct
  misc_feature 1..23: note = Description of Artificial Sequence: Synthetic expected off-target sequence
  source 1..23: mol_type = other DNA
ctgcctcctcaccccgcctcagg

SEQ ID NO: 1577 - DNA, 20 bp, synthetic construct
  misc_feature 1..20: note = Description of Artificial Sequence: Synthetic PCR primer
  source 1..20: mol_type = other DNA
cgtgtggtgagcctgagtct

SEQ ID NO: 1578 - DNA, 20 bp, synthetic construct
  misc_feature 1..20: note = Description of Artificial Sequence: Synthetic PCR primer
  source 1..20: mol_type = other DNA
gcttcaccgtagaggctgct

SEQ ID NO: 1579 - DNA, 23 bp, synthetic construct
  misc_feature 1..23: note = Description of Artificial Sequence: Synthetic expected off-target sequence
  source 1..23: mol_type = other DNA
tcttctttccaccccgcctcagg

SEQ ID NO: 1580 - DNA, 25 bp, synthetic construct
  misc_feature 1..25: note = Description of Artificial Sequence: Synthetic PCR primer
  source 1..25: mol_type = other DNA
aggccctgataattcatgctaccaa

SEQ ID NO: 1581 - DNA, 26 bp, synthetic construct
  misc_feature 1..26: note = Description of Artificial Sequence: Synthetic PCR primer
  source 1..26: mol_type = other DNA
tcagtgacaaccttttgtattcggca

SEQ ID NO: 1582 - DNA, 23 bp, synthetic construct
  misc_feature 1..23: note = Description of Artificial Sequence: Synthetic expected off-target sequence
  source 1..23: mol_type = other DNA
ttgaccccccgccccgcctcagg

SEQ ID NO: 1583 - DNA, 23 bp, synthetic construct
  misc_feature 1..23: note = Description of Artificial Sequence: Synthetic expected off-target sequence
  source 1..23: mol_type = other DNA
ggtgagtgagtgtgtgcgtgtgg

SEQ ID NO: 1584 - DNA, 20 bp, synthetic construct
  misc_feature 1..20: note = Description of Artificial Sequence: Synthetic PCR primer
  source 1..20: mol_type = other DNA
tccagatggcacattgtcag

SEQ ID NO: 1585 - DNA, 20 bp, synthetic construct
  misc_feature 1..20: note = Description of Artificial Sequence: Synthetic PCR primer
  source 1..20: mol_type = other DNA
agggagcaggaaagtgaggt

SEQ ID NO: 1586 - DNA, 23 bp, synthetic construct
  misc_feature 1..23: note = Description of Artificial Sequence: Synthetic expected off-target sequence
  source 1..23: mol_type = other DNA
ggtgagtgagtgtgtgtgtgagg

SEQ ID NO: 1587 - DNA, 20 bp, synthetic construct
  misc_feature 1..20: note = Description of Artificial Sequence: Synthetic PCR primer
  source 1..20: mol_type = other DNA
gcaggcaagctgtcaagggt

SEQ ID NO: 1588 - DNA, 20 bp, synthetic construct
  misc_feature 1..20: note = Description of Artificial Sequence: Synthetic PCR primer
  source 1..20: mol_type = other DNA
caccgacacacccactcacc

SEQ ID NO: 1589 - DNA, 23 bp, synthetic construct
  misc_feature 1..23: note = Description of Artificial Sequence: Synthetic expected off-target sequence
  source 1..23: mol_type = other DNA
agtgagtgagtgtgtgtgtgggg

SEQ ID NO: 1590 - DNA, 20 bp, synthetic construct
  misc_feature 1..20: note = Description of Artificial Sequence: Synthetic PCR primer
  source 1..20: mol_type = other DNA
gagggggaagtcaccgacaa

SEQ ID NO: 1591 - DNA, 20 bp, synthetic construct
  misc_feature 1..20: note = Description of Artificial Sequence: Synthetic PCR primer
  source 1..20: mol_type = other DNA
tacccgggccgtctgttaga

SEQ ID NO: 1592 - DNA, 23 bp, synthetic construct
  misc_feature 1..23: note = Description of Artificial Sequence: Synthetic expected off-target sequence
  source 1..23: mol_type = other DNA
agtgtgtgagtgtgtgcgtgtgg

SEQ ID NO: 1593 - DNA, 22 bp, synthetic construct
  misc_feature 1..22: note = Description of Artificial Sequence: Synthetic PCR primer
  source 1..22: mol_type = other DNA
gacaccccacacactctcatgc

SEQ ID NO: 1594 - DNA, 20 bp, synthetic construct
  misc_feature 1..20: note = Description of Artificial Sequence: Synthetic PCR primer
  source 1..20: mol_type = other DNA
tgaatcccttcacccccaag

SEQ ID NO: 1595 - DNA, 23 bp, synthetic construct
  misc_feature 1..23: note = Description of Artificial Sequence: Synthetic expected off-target sequence
  source 1..23: mol_type = other DNA
gctgagtgagtgtatgcgtgtgg

SEQ ID NO: 1596 - DNA, 20 bp, synthetic construct
  misc_feature 1..20: note = Description of Artificial Sequence: Synthetic PCR primer
  source 1..20: mol_type = other DNA
tcctttgaggttcatccccc

SEQ ID NO: 1597 - DNA, 20 bp, synthetic construct
  misc_feature 1..20: note = Description of Artificial Sequence: Synthetic PCR primer
  source 1..20: mol_type = other DNA
ccaatccaggatgattccgc

SEQ ID NO: 1598 - DNA, 23 bp, synthetic construct
  misc_feature 1..23: note = Description of Artificial Sequence: Synthetic expected off-target sequence
  source 1..23: mol_type = other DNA
ggtgagtcagtgtgtgagtgagg

SEQ ID NO: 1599 - DNA, 20 bp, synthetic construct
  misc_feature 1..20: note = Description of Artificial Sequence: Synthetic PCR primer
  source 1..20: mol_type = other DNA
cagggccaggaacacaggaa

SEQ ID NO: 1600 - DNA, 20 bp, synthetic construct
  misc_feature 1..20: note = Description of Artificial Sequence: Synthetic PCR primer
  source 1..20: mol_type = other DNA
gggaggtatgtgcgggagtg

SEQ ID NO: 1601 - DNA, 23 bp, synthetic construct
  misc_feature 1..23: note = Description of Artificial Sequence: Synthetic expected off-target sequence
  source 1..23: mol_type = other DNA
ggtgagtgagagtgtgtgtgtgg

SEQ ID NO: 1602 - DNA, 22 bp, synthetic construct
  misc_feature 1..22: note = Description of Artificial Sequence: Synthetic PCR primer
  source 1..22: mol_type = other DNA
tgcagcctgagtgagcaagtgt

SEQ ID NO: 1603 - DNA, 20 bp, synthetic construct
  misc_feature 1..20: note = Description of Artificial Sequence: Synthetic PCR primer
  source 1..20: mol_type = other DNA
gcccaggtgctaagcccctc

SEQ ID NO: 1604 - DNA, 23 bp, synthetic construct
  misc_feature 1..23: note = Description of Artificial Sequence: Synthetic expected off-target sequence
  source 1..23: mol_type = other DNA
ggtgagtgagtgagtgagtgagg

SEQ ID NO: 1605 - DNA, 20 bp, synthetic construct
  misc_feature 1..20: note = Description of Artificial Sequence: Synthetic PCR primer
  source 1..20: mol_type = other DNA
tacagcctgggtgatggagc

SEQ ID NO: 1606 - DNA, 23 bp, synthetic construct
  misc_feature 1..23: note = Description of Artificial Sequence: Synthetic PCR primer
  source 1..23: mol_type = other DNA
tgtgtcatggactttcccattgt

SEQ ID NO: 1607 - DNA, 23 bp, synthetic construct
  misc_feature 1..23: note = Description of Artificial Sequence: Synthetic expected off-target sequence
  source 1..23: mol_type = other DNA
ggtgagtgagtgagtgagtgagg

SEQ ID NO: 1608 - DNA, 25 bp, synthetic construct
  misc_feature 1..25: note = Description of Artificial Sequence: Synthetic PCR primer
  source 1..25: mol_type = other DNA
ggcaggcattaaactcatcaggtcc

SEQ ID NO: 1609 - DNA, 24 bp, synthetic construct
  misc_feature 1..24: note = Description of Artificial Sequence: Synthetic PCR primer
  source 1..24: mol_type = other DNA
tctcccccaaggtatcagagagct

SEQ ID NO: 1610 - DNA, 23 bp, synthetic construct
  misc_feature 1..23: note = Description of Artificial Sequence: Synthetic expected off-target sequence
  source 1..23: mol_type = other DNA
ggtgagtgagtgcgtgcgggtgg

SEQ ID NO: 1611 - DNA, 20 bp, synthetic construct
  misc_feature 1..20: note = Description of Artificial Sequence: Synthetic PCR primer
  source 1..20: mol_type = other DNA
gggcctccctgctggttctc

SEQ ID NO: 1612 - DNA, 20 bp, synthetic construct
  misc_feature 1..20: note = Description of Artificial Sequence: Synthetic PCR primer
  source 1..20: mol_type = other DNA
gctgccgtccgaacccaaga

SEQ ID NO: 1613 - DNA, 23 bp, synthetic construct
  misc_feature 1..23: note = Description of Artificial Sequence: Synthetic expected off-target sequence
  source 1..23: mol_type = other DNA
ggtgagtgtgtgtgtgagtgtgg

SEQ ID NO: 1614 - DNA, 20 bp, synthetic construct
  misc_feature 1..20: note = Description of Artificial Sequence: Synthetic PCR primer
  source 1..20: mol_type = other DNA
acaaacgcaggtggaccgaa

SEQ ID NO: 1615 - DNA, 21 bp, synthetic construct
  misc_feature 1..21: note = Description of Artificial Sequence: Synthetic PCR primer
  source 1..21: mol_type = other DNA
actccgaaaatgccccgcagt

SEQ ID NO: 1616 - DNA, 23 bp, synthetic construct
  misc_feature 1..23: note = Description of Artificial Sequence: Synthetic expected off-target sequence
  source 1..23: mol_type = other DNA
ggtgagtgtgtgtgtgcatgtgg

SEQ ID NO: 1617 - DNA, 19 bp, synthetic construct
  misc_feature 1..19: note = Description of Artificial Sequence: Synthetic PCR primer
  source 1..19: mol_type = other DNA
aggggaggggacattgcct

SEQ ID NO: 1618 - DNA, 21 bp, synthetic construct
  misc_feature 1..21: note = Description of Artificial Sequence: Synthetic PCR primer
  source 1..21: mol_type = other DNA
ttgagagggttcagtggttgc

SEQ ID NO: 1619 - DNA, 23 bp, synthetic construct
  misc_feature 1..23: note = Description of Artificial Sequence: Synthetic expected off-target sequence
  source 1..23: mol_type = other DNA
ggtgtgtgagtgtgtgtgtgtgg

SEQ ID NO: 1620 - DNA, 20 bp, synthetic construct
  misc_feature 1..20: note = Description of Artificial Sequence: Synthetic PCR primer
  source 1..20: mol_type = other DNA
ctaatgcttacggctgcggg

SEQ ID NO: 1621 - DNA, 20 bp, synthetic construct
  misc_feature 1..20: note = Description of Artificial Sequence: Synthetic PCR primer
  source 1..20: mol_type = other DNA
agccaacggcagatgcaaat

SEQ ID NO: 1622 - DNA, 23 bp, synthetic construct
  misc_feature 1..23: note = Description of Artificial Sequence: Synthetic expected off-target sequence
  source 1..23: mol_type = other DNA
ggtgtgtgtgtgtgtgcgtgcgg

SEQ ID NO: 1623 - DNA, 20 bp, synthetic construct
  misc_feature 1..20: note = Description of Artificial Sequence: Synthetic PCR primer
  source 1..20: mol_type = other DNA
gagcgaagttaacccaccgc

SEQ ID NO: 1624 - DNA, 20 bp, synthetic construct
  misc_feature 1..20: note = Description of Artificial Sequence: Synthetic PCR primer
  source 1..20: mol_type = other DNA
cacacatgcacatgcccctg

SEQ ID NO: 1625 - DNA, 23 bp, synthetic construct
  misc_feature 1..23: note = Description of Artificial Sequence: Synthetic expected off-target sequence
  source 1..23: mol_type = other DNA
ggtgtgtgtgtgtgtgcgtgtgg

SEQ ID NO: 1626 - DNA, 27 bp, synthetic construct
  misc_feature 1..27: note = Description of Artificial Sequence: Synthetic PCR primer
  source 1..27: mol_type = other DNA
gcatgtgtctaactggagacaatagca

SEQ ID NO: 1627 - DNA, 21 bp, synthetic construct
  misc_feature 1..21: note = Description of Artificial Sequence: Synthetic PCR primer
  source 1..21: mol_type = other DNA
tcccccatatcaacacacaca

SEQ ID NO: 1628 - DNA, 23 bp, synthetic construct
  misc_feature 1..23: note = Description of Artificial Sequence: Synthetic expected off-target sequence
  source 1..23: mol_type = other DNA
ggtgtgtgtgtgtgtgcgtgtgg

SEQ ID NO: 1629 - DNA, 20 bp, synthetic construct
  misc_feature 1..20: note = Description of Artificial Sequence: Synthetic PCR primer
  source 1..20: mol_type = other DNA
gcccctcccgccttttgtgt

SEQ ID NO: 1630 - DNA, 24 bp, synthetic construct
  misc_feature 1..24: note = Description of Artificial Sequence: Synthetic PCR primer
  source 1..24: mol_type = other DNA
tgggcaaaggacatgaaacagaca

SEQ ID NO: 1631 - DNA, 23 bp, synthetic construct
  misc_feature 1..23: note = Description of Artificial Sequence: Synthetic expected off-target sequence
  source 1..23: mol_type = other DNA
ggtgtgtgtgtgtgtgcgtgtgg

SEQ ID NO: 1632 - DNA, 23 bp, synthetic construct
  misc_feature 1..23: note = Description of Artificial Sequence: Synthetic PCR primer
  source 1..23: mol_type = other DNA
gcctcagctctgctcttaagccc

SEQ ID NO: 1633 - DNA, 27 bp, synthetic construct
  misc_feature 1..27: note = Description of Artificial Sequence: Synthetic PCR primer
  source 1..27: mol_type = other DNA
acgaacagatcatttttcatggcttcc

SEQ ID NO: 1634 - DNA, 23 bp, synthetic construct
  misc_feature 1..23: note = Description of Artificial Sequence: Synthetic expected off-target sequence
  source 1..23: mol_type = other DNA
gttgagtgaatgtgtgcgtgagg

SEQ ID NO: 1635 - DNA, 20 bp, synthetic construct
  misc_feature 1..20: note = Description of Artificial Sequence: Synthetic PCR primer
  source 1..20: mol_type = other DNA
ctccagagcctggcctacca

SEQ ID NO: 1636 - DNA, 20 bp, synthetic construct
  misc_feature 1..20: note = Description of Artificial Sequence: Synthetic PCR primer
  source 1..20: mol_type = other DNA
ccctctccggaagtgccttg

SEQ ID NO: 1637 - DNA, 23 bp, synthetic construct
  misc_feature 1..23: note = Description of Artificial Sequence: Synthetic expected off-target sequence
  source 1..23: mol_type = other DNA
tgtgggtgagtgtgtgcgtgagg

SEQ ID NO: 1638 - DNA, 23 bp, synthetic construct
  misc_feature 1..23: note = Description of Artificial Sequence: Synthetic PCR primer
  source 1..23: mol_type = other DNA
tctgtcaccacacagttaccacc

SEQ ID NO: 1639 - DNA, 20 bp, synthetic construct
  misc_feature 1..20: note = Description of Artificial Sequence: Synthetic PCR primer
  source 1..20: mol_type = other DNA
gttgcctggggatggggtat

SEQ ID NO: 1640 - DNA, 23 bp, synthetic construct
  misc_feature 1..23: note = Description of Artificial Sequence: Synthetic expected off-target sequence
  source 1..23: mol_type = other DNA
actgtgtgagtgtgtgcgtgagg

SEQ ID NO: 1641 - DNA, 20 bp, synthetic construct
  misc_feature 1..20: note = Description of Artificial Sequence: Synthetic PCR primer
  source 1..20: mol_type = other DNA
ggggaccctcaagaggcact

SEQ ID NO: 1642 - DNA, 20 bp, synthetic construct
  misc_feature 1..20: note = Description of Artificial Sequence: Synthetic PCR primer
  source 1..20: mol_type = other DNA
gggcatcaaaggatggggat

SEQ ID NO: 1643 - DNA, 23 bp, synthetic construct
  misc_feature 1..23: note = Description of Artificial Sequence: Synthetic expected off-target sequence
  source 1..23: mol_type = other DNA
agagagtgagtgtgtgcatgagg

SEQ ID NO: 1644 - DNA, 20 bp, synthetic construct
  misc_feature 1..20: note = Description of Artificial Sequence: Synthetic PCR primer
  source 1..20: mol_type = other DNA
tgtggagggtgggacctggt

SEQ ID NO: 1645 - DNA, 22 bp, synthetic construct
  misc_feature 1..22: note = Description of Artificial Sequence: Synthetic PCR primer
  source 1..22: mol_type = other DNA
acagtgaggtgcggtctttggg

SEQ ID NO: 1646 - DNA, 23 bp, synthetic construct
  misc_feature 1..23: note = Description of Artificial Sequence: Synthetic expected off-target sequence
  source 1..23: mol_type = other DNA
agcgagtgggtgtgtgcgtgggg

SEQ ID NO: 1647 - DNA, 20 bp, synthetic construct
  misc_feature 1..20: note = Description of Artificial Sequence: Synthetic PCR primer
  source 1..20: mol_type = other DNA
cggggtggcagtgacgtcaa

SEQ ID NO: 1648 - DNA, 20 bp, synthetic construct
  misc_feature 1..20: note = Description of Artificial Sequence: Synthetic PCR primer
  source 1..20: mol_type = other DNA
ggtgcagtccaagagccccc

SEQ ID NO: 1649 - DNA, 23 bp, synthetic construct
  misc_feature 1..23: note = Description of Artificial Sequence: Synthetic expected off-target sequence
  source 1..23: mol_type = other DNA
agggagtgactgtgtgcgtgtgg

SEQ ID NO: 1650 - DNA, 20 bp, synthetic construct
  misc_feature 1..20: note = Description of Artificial Sequence: Synthetic PCR primer
  source 1..20: mol_type = other DNA
agctgaggcagagtccccga

SEQ ID NO: 1651 - DNA, 20 bp, synthetic construct
  misc_feature 1..20: note = Description of Artificial Sequence: Synthetic PCR primer
  source 1..20: mol_type = other DNA
gggagacagagcagcgcctc

SEQ ID NO: 1652 - DNA, 23 bp, synthetic construct
  misc_feature 1..23: note = Description of Artificial Sequence: Synthetic expected off-target sequence
  source 1..23: mol_type = other DNA
agtgagtgagtgagtgagtgagg

SEQ ID NO: 1653 - DNA, 20 bp, synthetic construct
  misc_feature 1..20: note = Description of Artificial Sequence: Synthetic PCR primer
  source 1..20: mol_type = other DNA
accaccagaccccacctcca

SEQ ID NO: 1654 - DNA, 22 bp, synthetic construct
  misc_feature 1..22: note = Description of Artificial Sequence: Synthetic PCR primer
  source 1..22: mol_type = other DNA
aggacgacttgtgccccattca

SEQ ID NO: 1655 - DNA, 23 bp, synthetic construct
  misc_feature 1..23: note = Description of Artificial Sequence: Synthetic expected off-target sequence
  source 1..23: mol_type = other DNA
catgagtgagtgtgtgggtgggg

SEQ ID NO: 1656 - DNA, 20 bp, synthetic construct
  misc_feature 1..20: note = Description of Artificial Sequence: Synthetic PCR primer
  source 1..20: mol_type = other DNA
gggtcaggacgcaggtcaga

SEQ ID NO: 1657 - DNA, 20 bp, synthetic construct
  misc_feature 1..20: note = Description of Artificial Sequence: Synthetic PCR primer
  source 1..20: mol_type = other DNA
tccacccacccacccatcct

SEQ ID NO: 1658 - DNA, 23 bp, synthetic construct
  misc_feature 1..23: note = Description of Artificial Sequence: Synthetic expected off-target sequence
  source 1..23: mol_type = other DNA
cgtgagtgtgtgtatgcgtgtgg

SEQ ID NO: 1659 - DNA, 22 bp, synthetic construct
  misc_feature 1..22: note = Description of Artificial Sequence: Synthetic PCR primer
  source 1..22: mol_type = other DNA
acactctgggctaggtgctgga

SEQ ID NO: 1660 - DNA, 21 bp, synthetic construct
  misc_feature 1..21: note = Description of Artificial Sequence: Synthetic PCR primer
  source 1..21: mol_type = other DNA
gccccctcaccacatgatgct

SEQ ID NO: 1661 - DNA, 23 bp, synthetic construct
  misc_feature 1..23: note = Description of Artificial Sequence: Synthetic expected off-target sequence
  source 1..23: mol_type = other DNA
ggactgtgagtgtgtgcgtgagg

SEQ ID NO: 1662 - DNA, 20 bp, synthetic construct
  misc_feature 1..20: note = Description of Artificial Sequence: Synthetic PCR primer
  source 1..20: mol_type = other DNA
ggggccattcctctgctgca

SEQ ID NO: 1663 - DNA, 20 bp, synthetic construct
  misc_feature 1..20: note = Description of Artificial Sequence: Synthetic PCR primer
  source 1..20: mol_type = other DNA
tggggatccttgctcatggc

SEQ ID NO: 1664 - DNA, 23 bp, synthetic construct
  misc_feature 1..23: note = Description of Artificial Sequence: Synthetic expected off-target sequence
  source 1..23: mol_type = other DNA
ggtgtgtgcctgtgtgcgtgtgg

SEQ ID NO: 1665 - DNA, 22 bp, synthetic construct
  misc_feature 1..22: note = Description of Artificial Sequence: Synthetic PCR primer
  source 1..22: mol_type = other DNA
acacactggctcgcattcacca

SEQ ID NO: 1666 - DNA, 20 bp, synthetic construct
  misc_feature 1..20: note = Description of Artificial Sequence: Synthetic PCR primer
  source 1..20: mol_type = other DNA
cctgcacgaggccaggtgtt

SEQ ID NO: 1667 - DNA, 23 bp, synthetic construct
  misc_feature 1..23: note = Description of Artificial Sequence: Synthetic expected off-target sequence
  source 1..23: mol_type = other DNA
gtttcatgagtgtgtgcgtgggg

SEQ ID NO: 1668 - DNA, 23 bp, synthetic construct
  misc_feature 1..23: note = Description of Artificial Sequence: Synthetic PCR primer
  source 1..23: mol_type = other DNA
tgggcacgtagtaaactgcacca

SEQ ID NO: 1669 - DNA, 20 bp, synthetic construct
  misc_feature 1..20: note = Description of Artificial Sequence: Synthetic PCR primer
  source 1..20: mol_type = other DNA
ctcgccgccgtgactgtagg

SEQ ID NO: 1670 - DNA, 23 bp, synthetic construct
  misc_feature 1..23: note = Description of Artificial Sequence: Synthetic expected off-target sequence
  source 1..23: mol_type = other DNA
tgagtgtgagtgtgtgcgtgggg

SEQ ID NO: 1671 - DNA, 20 bp, synthetic construct
  misc_feature 1..20: note = Description of Artificial Sequence: Synthetic PCR primer
  source 1..20: mol_type = other DNA
tcagctggtcctgggcttgg

SEQ ID NO: 1672 - DNA, 22 bp, synthetic construct
  misc_feature 1..22: note = Description of Artificial Sequence: Synthetic PCR primer
  source 1..22: mol_type = other DNA
agagcactgggtagcagtcagt

SEQ ID NO: 1673 - DNA, 23 bp, synthetic construct
  misc_feature 1..23: note = Description of Artificial Sequence: Synthetic expected off-target sequence
  source 1..23: mol_type = other DNA
tgccagtgagtgtgtgcgtgtgg

SEQ ID NO: 1674 - DNA, 20 bp, synthetic construct
  misc_feature 1..20: note = Description of Artificial Sequence: Synthetic PCR primer
  source 1..20: mol_type = other DNA
agacacagccagggcctcag

SEQ ID NO: 1675 - DNA, 20 bp, synthetic construct
  misc_feature 1..20: note = Description of Artificial Sequence: Synthetic PCR primer
  source 1..20: mol_type = other DNA
ggtgggcgtgtgtgtgtacc

SEQ ID NO: 1676 - DNA, 23 bp, synthetic construct
  misc_feature 1..23: note = Description of Artificial Sequence: Synthetic expected off-target sequence
  source 1..23: mol_type = other DNA
tgggtgtgagtgtgtgcgtgtgg

SEQ ID NO: 1677 - DNA, 21 bp, synthetic construct
  misc_feature 1..21: note = Description of Artificial Sequence: Synthetic PCR primer
  source 1..21: mol_type = other DNA
acactctcacacacgcaccaa

SEQ ID NO: 1678 - DNA, 20 bp, synthetic construct
  misc_feature 1..20: note = Description of Artificial Sequence: Synthetic PCR primer
  source 1..20: mol_type = other DNA
gagaagtcagggctggcggg

SEQ ID NO: 1679 - DNA, 23 bp, synthetic construct
  misc_feature 1..23: note = Description of Artificial Sequence: Synthetic expected off-target sequence
  source 1..23: mol_type = other DNA
tgtatgtgagtgtgtgcgtgtgg

SEQ ID NO: 1680 - DNA, 20 bp, synthetic construct
  misc_feature 1..20: note = Description of Artificial Sequence: Synthetic PCR primer
  source 1..20: mol_type = other DNA
actgcctgcatttccccggt

SEQ ID NO: 1681 - DNA, 20 bp, synthetic construct
  misc_feature 1..20: note = Description of Artificial Sequence: Synthetic PCR primer
  source 1..20: mol_type = other DNA
tggtgagggcttcagggagc

SEQ ID NO: 1682 - DNA, 23 bp, synthetic construct
  misc_feature 1..23: note = Description of Artificial Sequence: Synthetic expected off-target sequence
  source 1..23: mol_type = other DNA
tgtgagagagagtgtgcgtgtgg

SEQ ID NO: 1683 - DNA, 20 bp, synthetic construct
  misc_feature 1..20: note = Description of Artificial Sequence: Synthetic PCR primer
  source 1..20: mol_type = other DNA
gccaggttcattgactgccc

SEQ ID NO: 1684 - DNA, 20 bp, synthetic construct
  misc_feature 1..20: note = Description of Artificial Sequence: Synthetic PCR primer
  source 1..20: mol_type = other DNA
tccttctacacatcggcggc

SEQ ID NO: 1685 - DNA, 23 bp, synthetic construct
  misc_feature 1..23: note = Description of Artificial Sequence: Synthetic expected off-target sequence
  source 1..23: mol_type = other DNA
tgtgcctgagtgtgtgcgtgtgg

SEQ ID NO: 1686 - DNA, 20 bp, synthetic construct
  misc_feature 1..20: note = Description of Artificial Sequence: Synthetic PCR primer
  source 1..20: mol_type = other DNA
cgagggagccgagttcgtaa

SEQ ID NO: 1687 - DNA, 20 bp, synthetic construct
  misc_feature 1..20: note = Description of Artificial Sequence: Synthetic PCR primer
  source 1..20: mol_type = other DNA
ctgacctggggctctggtac

SEQ ID NO: 1688 - DNA, 23 bp, synthetic construct
  misc_feature 1..23: note = Description of Artificial Sequence: Synthetic expected off-target sequence
  source 1..23: mol_type = other DNA
tgtgtgtgtgtgtgtgcgtgtgg

SEQ ID NO: 1689 - DNA, 22 bp, synthetic construct
  misc_feature 1..22: note = Description of Artificial Sequence: Synthetic PCR primer
  source 1..22: mol_type = other DNA
tcctcgggaagtcatggcttca

SEQ ID NO: 1690 - DNA, 21 bp, synthetic construct
  misc_feature 1..21: note = Description of Artificial Sequence: Synthetic PCR primer
  source 1..21: mol_type = other DNA
gcactgagcaaccaggagcac

SEQ ID NO: 1691 - DNA, 23 bp, synthetic construct
  misc_feature 1..23: note = Description of Artificial Sequence: Synthetic expected off-target sequence
  source 1..23: mol_type = other DNA
agcgtgtgagtgtatgcgtgggg

SEQ ID NO: 1692 - DNA, 23 bp, synthetic construct
  misc_feature 1..23: note = Description of Artificial Sequence: Synthetic expected off-target sequence
  source 1..23: mol_type = other DNA
attgagtgtgtgagtgcgtgggg

SEQ ID NO: 1693 - DNA, 20 bp, synthetic construct
  misc_feature 1..20: note = Description of Artificial Sequence: Synthetic PCR primer
  source 1..20: mol_type = other DNA
taaaccgttgcccccgcctc

SEQ ID NO: 1694 - DNA, 20 bp, synthetic construct
  misc_feature 1..20: note = Description of Artificial Sequence: Synthetic PCR primer
  source 1..20: mol_type = other DNA
gctcccctgccaggtgaacc

SEQ ID NO: 1695 - DNA, 23 bp, synthetic construct
  misc_feature 1..23: note = Description of Artificial Sequence: Synthetic expected off-target sequence
  source 1..23: mol_type = other DNA
catgtgtgggtgtgtgcgtgtgg

SEQ ID NO: 1696 - DNA, 20 bp, synthetic construct
  misc_feature 1..20: note = Description of Artificial Sequence: Synthetic PCR primer
  source 1..20: mol_type = other DNA
cctgctgagactccaggtcc

SEQ ID NO: 1697 - DNA, 20 bp, synthetic construct
  misc_feature 1..20: note = Description of Artificial Sequence: Synthetic PCR primer
  source 1..20: mol_type = other DNA
ctgcggagtggctggctata

SEQ ID NO: 1698 - DNA, 23 bp, synthetic construct
  misc_feature 1..23: note = Description of Artificial Sequence: Synthetic expected off-target sequence
  source 1..23: mol_type = other DNA
cccgagtgtgtgtgtgcgtgtgg

SEQ ID NO: 1699 - DNA, 20 bp, synthetic construct
  misc_feature 1..20: note = Description of Artificial Sequence: Synthetic PCR primer
  source 1..20: mol_type = other DNA
ctcggggactgacaagccgg

SEQ ID NO: 1700 - DNA, 20 bp, synthetic construct
  misc_feature 1..20: note = Description of Artificial Sequence: Synthetic PCR primer
  source 1..20: mol_type = other DNA
ggagcagctcttccagggcc

SEQ ID NO: 1701 - DNA, 23 bp, synthetic construct
  misc_feature 1..23: note = Description of Artificial Sequence: Synthetic expected off-target sequence
  source 1..23: mol_type = other DNA
ctggagtgagtgtgtgtgtgtgg

SEQ ID NO: 1702 - DNA, 20 bp, synthetic construct
  misc_feature 1..20: note = Description of Artificial Sequence: Synthetic PCR primer
  source 1..20: mol_type = other DNA
ccccgaccaaagcaggagca

SEQ ID NO: 1703 - DNA, 20 bp, synthetic construct
  misc_feature 1..20: note = Description of Artificial Sequence: Synthetic PCR primer
  source 1..20: mol_type = other DNA
ctggcagcctctggatgggg

SEQ ID NO: 1704 - DNA, 23 bp, synthetic construct
  misc_feature 1..23: note = Description of Artificial Sequence: Synthetic expected off-target sequence
  source 1..23: mol_type = other DNA
gtttcatgagtgtgtgcgtgggg

SEQ ID NO: 1705 - DNA, 23 bp, synthetic construct
  misc_feature 1..23: note = Description of Artificial Sequence: Synthetic expected off-target sequence
  source 1..23: mol_type = other DNA
tatgtgtgcgtgtgtgcgtgtgg

SEQ ID NO: 1706 - DNA, 20 bp, synthetic construct
  misc_feature 1..20: note = Description of Artificial Sequence: Synthetic PCR primer
  source 1..20: mol_type = other DNA
atttcagagccccggggaaa

SEQ ID NO: 1707 - DNA, 20 bp, synthetic construct
  misc_feature 1..20: note = Description of Artificial Sequence: Synthetic PCR primer
  source 1..20: mol_type = other DNA
aggccgcggtgttatggtta

SEQ ID NO: 1708 - DNA, 23 bp, synthetic construct
  misc_feature 1..23: note = Description of Artificial Sequence: Synthetic expected off-target sequence
  source 1..23: mol_type = other DNA
tatgtgtgtgtgtgtgcgtgggg

SEQ ID NO: 1709 - DNA, 24 bp, synthetic construct
  misc_feature 1..24: note = Description of Artificial Sequence: Synthetic PCR primer
  source 1..24: mol_type = other DNA
gccagtggcttagtgtctttgtgt

SEQ ID NO: 1710 - DNA, 25 bp, synthetic construct
  misc_feature 1..25: note = Description of Artificial Sequence: Synthetic PCR primer
  source 1..25: mol_type = other DNA
tgacatattttcctgggccatgggt

SEQ ID NO: 1711 - DNA, 23 bp, synthetic construct
  misc_feature 1..23: note = Description of Artificial Sequence: Synthetic expected off-target sequence
  source 1..23: mol_type = other DNA
tctgtgtgtgtgtgtgcgtgggg

SEQ ID NO: 1712 - DNA, 22 bp, synthetic construct
  misc_feature 1..22: note = Description of Artificial Sequence: Synthetic PCR primer
  source 1..22: mol_type = other DNA
tgccagaagaacatgggccaga

SEQ ID NO: 1713 - DNA, 27 bp, synthetic construct
  misc_feature 1..27: note = Description of Artificial Sequence: Synthetic PCR primer
  source 1..27: mol_type = other DNA
ccatgctgacatcatatactgggaagc

SEQ ID NO: 1714 - DNA, 23 bp, synthetic construct
  misc_feature 1..23: note = Description of Artificial Sequence: Synthetic expected off-target sequence
  source 1..23: mol_type = other DNA
tctgtgtgtgtgtgtgcgtgtgg

SEQ ID NO: 1715 - DNA, 20 bp, synthetic construct
  misc_feature 1..20: note = Description of Artificial Sequence: Synthetic PCR primer
  source 1..20: mol_type = other DNA
gcgtgtctctgtgtgcgtgc

SEQ ID NO: 1716 - DNA, 20 bp, synthetic construct
  misc_feature 1..20: note = Description of Artificial Sequence: Synthetic PCR primer
  source 1..20: mol_type = other DNA
ccaggctgggcacacaggtt

SEQ ID NO: 1717 - DNA, 23 bp, synthetic construct
  misc_feature 1..23: note = Description of Artificial Sequence: Synthetic expected off-target sequence
  source 1..23: mol_type = other DNA
tgagcgtgagtgtgagcgtgtgg

SEQ ID NO: 1718 - DNA, 23 bp, synthetic construct
  misc_feature 1..23: note = Description of Artificial Sequence: Synthetic expected off-target sequence
  source 1..23: mol_type = other DNA
tgtctttgagtgtgtgcgtgtgg

SEQ ID NO: 1719 - DNA, 25 bp, synthetic construct
  misc_feature 1..25: note = Description of Artificial Sequence: Synthetic PCR primer
  source 1..25: mol_type = other DNA
tgcccagtccaatatttcagcagct

SEQ ID NO: 1720 - DNA, 26 bp, synthetic construct
  misc_feature 1..26: note = Description of Artificial Sequence: Synthetic PCR primer
  source 1..26: mol_type = other DNA
aggatgagttcatgtcctttgtgggg

SEQ ID NO: 1721 - DNA, 23 bp, synthetic construct
  misc_feature 1..23: note = Description of Artificial Sequence: Synthetic expected off-target sequence
  source 1..23: mol_type = other DNA
tttgtgtgtgtgtgtgcgtgtgg

SEQ ID NO: 1722 - DNA, 27 bp, synthetic construct
  misc_feature 1..27: note = Description of Artificial Sequence: Synthetic PCR primer
  source 1..27: mol_type = other DNA
gggtgaaaatttggtactgttagctgt

SEQ ID NO: 1723 - DNA, 27 bp, synthetic construct
  misc_feature 1..27: note = Description of Artificial Sequence: Synthetic PCR primer
  source 1..27: mol_type = other DNA
aatgactcattccctgggtatctccca

SEQ ID NO: 1724 - DNA, 23 bp, synthetic construct
  misc_feature 1..23: note = Description of Artificial Sequence: Synthetic expected off-target sequence
  source 1..23: mol_type = other DNA
aaggcgtgtgtgtgtgcgtgtgg

SEQ ID NO: 1725 - DNA, 21 bp, synthetic construct
  misc_feature 1..21: note = Description of Artificial Sequence: Synthetic PCR primer
  source 1..21: mol_type = other DNA
tgccccatcaatcacctcggc

SEQ ID NO: 1726 - DNA, 20 bp, synthetic construct
  misc_feature 1..20: note = Description of Artificial Sequence: Synthetic PCR primer
  source 1..20: mol_type = other DNA
caaggtcggcagggcagtga

SEQ ID NO: 1727 - DNA, 23 bp, synthetic construct
  misc_feature 1..23: note = Description of Artificial Sequence: Synthetic expected off-target sequence
  source 1..23: mol_type = other DNA
aattcgtgtgtgtgtgcgtgggg

SEQ ID NO: 1728 - DNA, 20 bp, synthetic construct
  misc_feature 1..20: note = Description of Artificial Sequence: Synthetic PCR primer
  source 1..20: mol_type = other DNA
gcctcctctgccgctggtaa

SEQ ID NO: 1729 - DNA, 24 bp, synthetic construct
  misc_feature 1..24: note = Description of Artificial Sequence: Synthetic PCR primer
  source 1..24: mol_type = other DNA
tgagagttcctgttgctccacact

SEQ ID NO: 1730 - DNA, 23 bp, synthetic construct
  misc_feature 1..23: note = Description of Artificial Sequence: Synthetic expected off-target sequence
  source 1..23: mol_type = other DNA
atggtgtgtgtgtgtgcgtgtgg

SEQ ID NO: 1731 - DNA, 23 bp, synthetic construct
  misc_feature 1..23: note = Description of Artificial Sequence: Synthetic expected off-target sequence
  source 1..23: mol_type = other DNA
cacgtgtgtgtgtgtgcgtgtgg

SEQ ID NO: 1732 - DNA, 20 bp, synthetic construct
  misc_feature 1..20: note = Description of Artificial Sequence: Synthetic PCR primer
  source 1..20: mol_type = other DNA
gccaccaaaatagccagcgt

SEQ ID NO: 1733 - DNA, 20 bp, synthetic construct
  misc_feature 1..20: note = Description of Artificial Sequence: Synthetic PCR primer
  source 1..20: mol_type = other DNA
acatgcatctgtgtgtgcgt

SEQ ID NO: 1734 - DNA, 23 bp, synthetic construct
  misc_feature 1..23: note = Description of Artificial Sequence: Synthetic expected off-target sequence
  source 1..23: mol_type = other DNA
gaaatttgagtgtgtgcgtgtgg

SEQ ID NO: 1735 - DNA, 27 bp, synthetic construct
  misc_feature 1..27: note = Description of Artificial Sequence: Synthetic PCR primer
  source 1..27: mol_type = other DNA
acagactgacccttgaaaaataccagt

SEQ ID NO: 1736 - DNA, 27 bp, synthetic construct
  misc_feature 1..27: note = Description of Artificial Sequence: Synthetic PCR primer
  source 1..27: mol_type = other DNA
tgtatctttcttgccaatggttttccc

SEQ ID NO: 1737 - DNA, 23 bp, synthetic construct
  misc_feature 1..23: note = Description of Artificial Sequence: Synthetic expected off-target sequence
  source 1..23: mol_type = other DNA
taagtgtgtgtgtgtgcgtgtgg

SEQ ID NO: 1738 - DNA, 25 bp, synthetic construct
  misc_feature 1..25: note = Description of Artificial Sequence: Synthetic PCR primer
  source 1..25: mol_type = other DNA
agccaaatttctcaacagcagcact

SEQ ID NO: 1739 - DNA, 23 bp, synthetic construct
  misc_feature 1..23: note = Description of Artificial Sequence: Synthetic PCR primer
  source 1..23: mol_type = other DNA
tcctggagagcaggcatttttgt

SEQ ID NO: 1740 - DNA, 23 bp, synthetic construct
  misc_feature 1..23: note = Description of Artificial Sequence: Synthetic expected off-target sequence
  source 1..23: mol_type = other DNA
tatatgtgtgtgtgtgcgtgggg

SEQ ID NO: 1741 - DNA, 20 bp, synthetic construct
  misc_feature 1..20: note = Description of Artificial Sequence: Synthetic PCR primer
  source 1..20: mol_type = other DNA
acctccttgtgctgcctggc

SEQ ID NO: 1742 - DNA, 20 bp, synthetic construct
  misc_feature 1..20: note = Description of Artificial Sequence: Synthetic PCR primer
  source 1..20: mol_type = other DNA
ggcgggaaggtaaccctggg

SEQ ID NO: 1743 - DNA, 23 bp, synthetic construct
  misc_feature 1..23: note = Description of Artificial Sequence: Synthetic expected off-target sequence
  source 1..23: mol_type = other DNA
tatctgtgtgtgtgtgcgtgtgg

SEQ ID NO: 1744 - DNA, 27 bp, synthetic construct
  misc_feature 1..27: note = Description of Artificial Sequence: Synthetic PCR primer
  source 1..27: mol_type = other DNA
cacaaagctctacctttccagtagtgt

SEQ ID NO: 1745 - DNA, 23 bp, synthetic construct
  misc_feature 1..23: note = Description of Artificial Sequence: Synthetic PCR primer
  source 1..23: mol_type = other DNA
tgatccgatggttgttcacagct

SEQ ID NO: 1746 - DNA, 23 bp, synthetic construct
  misc_feature 1..23: note = Description of Artificial Sequence: Synthetic expected off-target sequence
  source 1..23: mol_type = other DNA
tttatgtgtgtgtgtgcgtgtgg

SEQ ID NO: 1747 - DNA, 21 bp, synthetic construct
  misc_feature 1..21: note = Description of Artificial Sequence: Synthetic PCR primer
  source 1..21: mol_type = other DNA
tgtggggattacctgcctggc

SEQ ID NO: 1748 - DNA, 22 bp, synthetic construct
  misc_feature 1..22: note = Description of Artificial Sequence: Synthetic PCR primer
  source 1..22: mol_type = other DNA
acgcacaaaaatgcccttgtca

SEQ ID NO: 1749 - DNA, 23 bp, synthetic construct
  misc_feature 1..23: note = Description of Artificial Sequence: Synthetic expected off-target sequence
  source 1..23: mol_type = other DNA
tttttgtgtgtgtgtgcgtgggg

SEQ ID NO: 1750 - DNA, 22 bp, synthetic construct
  misc_feature 1..22: note = Description of Artificial Sequence: Synthetic PCR primer
  source 1..22: mol_type = other DNA
tgaggcagaccagtcatccagc

SEQ ID NO: 1751 - DNA, 20 bp, synthetic construct
  misc_feature 1..20: note = Description of Artificial Sequence: Synthetic PCR primer
  source 1..20: mol_type = other DNA
gcccgagcacagtgtagggc

SEQ ID NO: 1752 - DNA, 23 bp, synthetic construct
  misc_feature 1..23: note = Description of Artificial Sequence: Synthetic expected off-target sequence
  source 1..23: mol_type = other DNA
aaaaattgtgtgtgtgcgtgggg

SEQ ID NO: 1753 - DNA, 20 bp, synthetic construct
  misc_feature 1..20: note = Description of Artificial Sequence: Synthetic PCR primer
  source 1..20: mol_type = other DNA
attagctgggcgtggcggag

SEQ ID NO: 1754 - DNA, 23 bp, synthetic construct
  misc_feature 1..23: note = Description of Artificial Sequence: Synthetic PCR primer
  source 1..23: mol_type = other DNA
actgcatctcatctcaggcagct

SEQ ID NO: 1755 - DNA, 23 bp, synthetic construct
  misc_feature 1..23: note = Description of Artificial Sequence: Synthetic expected off-target sequence
  source 1..23: mol_type = other DNA
acaatgtgtgtgtgtgcgtgtgg

SEQ ID NO: 1756 - DNA, 24 bp, synthetic construct
  misc_feature 1..24: note = Description of Artificial Sequence: Synthetic PCR primer
  source 1..24: mol_type = other DNA
tgaagcagaaggagtggagaagga

SEQ ID NO: 1757 - DNA, 27 bp, synthetic construct
  misc_feature 1..27: note = Description of Artificial Sequence: Synthetic PCR primer
  source 1..27: mol_type = other DNA
tcagcttcacatctgtttcagttcagt

SEQ ID NO: 1758 - DNA, 23 bp, synthetic construct
  misc_feature 1..23: note = Description of Artificial Sequence: Synthetic expected off-target sequence
  source 1..23: mol_type = other DNA
atgtggtgtgtgtgtgcgtgtgg

SEQ ID NO: 1759 - DNA, 20 bp, synthetic construct
  misc_feature 1..20: note = Description of Artificial Sequence: Synthetic PCR primer
  source 1..20: mol_type = other DNA
tggtggagtgtgtgtgtggt

SEQ ID NO: 1760 - DNA, 21 bp, synthetic construct
  misc_feature 1..21: note = Description of Artificial Sequence: Synthetic PCR primer
  source 1..21: mol_type = other DNA
agagcagaaagagagtgccca

SEQ ID NO: 1761 - DNA, 23 bp, synthetic construct
  misc_feature 1..23: note = Description of Artificial Sequence: Synthetic expected off-target sequence
  source 1..23: mol_type = other DNA
caaaattgtgtgtgtgcgtgtgg

SEQ ID NO: 1762 - DNA, 21 bp, synthetic construct
  misc_feature 1..21: note = Description of Artificial Sequence: Synthetic PCR primer
  source 1..21: mol_type = other DNA
gcccctgtacgtcctgacagc

SEQ ID NO: 1763 - DNA, 23 bp, synthetic construct
  misc_feature 1..23: note = Description of Artificial Sequence: Synthetic PCR primer
  source 1..23: mol_type = other DNA
tgcacaagccacttagcctctct

SEQ ID NO: 1764 - DNA, 23 bp, synthetic construct
  misc_feature 1..23: note = Description of Artificial Sequence: Synthetic expected off-target sequence
  source 1..23: mol_type = other DNA
ccctggtgtgtgtgtgcgtgtgg

SEQ ID NO: 1765 - DNA, 20 bp, synthetic construct
  misc_feature 1..20: note = Description of Artificial Sequence: Synthetic PCR primer
  source 1..20: mol_type = other DNA
agcgcaggtaaacaggccca

SEQ ID NO: 1766 - DNA, 21 bp, synthetic construct
  misc_feature 1..21: note = Description of Artificial Sequence: Synthetic PCR primer
  source 1..21: mol_type = other DNA
tctctcgccccgtttccttgt

SEQ ID NO: 1767 - DNA, 23 bp, synthetic construct
  misc_feature 1..23: note = Description of Artificial Sequence: Synthetic expected off-target sequence
  source 1..23: mol_type = other DNA
tccgcttgtgtgtgtgcgtgggg

SEQ ID NO: 1768 - DNA, 20 bp, synthetic construct
  misc_feature 1..20: note = Description of Artificial Sequence: Synthetic PCR primer
  source 1..20: mol_type = other DNA
atgggtgccaggtaccacgc

SEQ ID NO: 1769 - DNA, 20 bp, synthetic construct
  misc_feature 1..20: note = Description of Artificial Sequence: Synthetic PCR primer
  source 1..20: mol_type = other DNA
acagcaggaaggagccgcag

SEQ ID NO: 1770 - DNA, 23 bp, synthetic construct
  misc_feature 1..23: note = Description of Artificial Sequence: Synthetic expected off-target sequence
  source 1..23: mol_type = other DNA
tcctcgtgtgtgtgtgcgtgtgg

SEQ ID NO: 1771 - DNA, 20 bp, synthetic construct
  misc_feature 1..20: note = Description of Artificial Sequence: Synthetic PCR primer
  source 1..20: mol_type = other DNA
cgggcgggtggacagatgag

SEQ ID NO: 1772 - DNA, 20 bp, synthetic construct
  misc_feature 1..20: note = Description of Artificial Sequence: Synthetic PCR primer
  source 1..20: mol_type = other DNA
aggaggtctcgagccagggg

SEQ ID NO: 1773 - DNA, 23 bp, synthetic construct
  misc_feature 1..23: note = Description of Artificial Sequence: Synthetic expected off-target sequence
  source 1..23: mol_type = other DNA
ttaaggtgggtgtgtgcgtgggg

SEQ ID NO: 1774 - DNA, 26 bp, synthetic construct
  misc_feature 1..26: note = Description of Artificial Sequence: Synthetic PCR primer
  source 1..26: mol_type = other DNA
tcaacctagtgaacacagaccactga

SEQ ID NO: 1775 - DNA, 27 bp, synthetic construct
  misc_feature 1..27: note = Description of Artificial Sequence: Synthetic PCR primer
  source 1..27: mol_type = other DNA
gtctatatacagcccacaacctcatgt

SEQ ID NO: 1776 - DNA, 23 bp, synthetic construct
  misc_feature 1..23: note = Description of Artificial Sequence: Synthetic expected off-target sequence
  source 1..23: mol_type = other DNA
ttatattgtgtgtgtgcgtgggg

SEQ ID NO: 1777 - DNA, 20 bp, synthetic construct
  misc_feature 1..20: note = Description of Artificial Sequence: Synthetic PCR primer
  source 1..20: mol_type = other DNA
gccagggccagtggattgct

SEQ ID NO: 1778 - DNA, 26 bp, synthetic construct
  misc_feature 1..26: note = Description of Artificial Sequence: Synthetic PCR primer
  source 1..26: mol_type = other DNA
tgtcatttcttagtatgtcagccgga

SEQ ID NO: 1779 - DNA, 23 bp, synthetic construct
  misc_feature 1..23: note = Description of Artificial Sequence: Synthetic expected off-target sequence
  source 1..23: mol_type = other DNA
ttgaggagagtgtgtgcgtgagg

SEQ ID NO: 1780 - DNA, 20 bp, synthetic construct
  misc_feature 1..20: note = Description of Artificial Sequence: Synthetic PCR primer
  source 1..20: mol_type = other DNA
gagccccaccggttcagtcc

SEQ ID NO: 1781 - DNA, 20 bp, synthetic construct
  misc_feature 1..20: note = Description of Artificial Sequence: Synthetic PCR primer
  source 1..20: mol_type = other DNA
gccagagctacccactcgcc

SEQ ID NO: 1782-1784 - skipped (3 entries)

SEQ ID NO: 1785 - DNA, 23 bp, synthetic construct
  misc_feature 1..23: note = Description of Artificial Sequence: Synthetic expected off-target sequence
  source 1..23: mol_type = other DNA
gagtccgagcagaagaagaaggg

SEQ ID NO: 1786 - DNA, 20 bp, synthetic construct
  misc_feature 1..20: note = Description of Artificial Sequence: Synthetic PCR primer
  source 1..20: mol_type = other DNA
ggagcagctggtcagagggg

SEQ ID NO: 1787 - DNA, 20 bp, synthetic construct
  misc_feature 1..20: note = Description of Artificial Sequence: Synthetic PCR primer
  source 1..20: mol_type = other DNA
gggaagggggacactgggga

SEQ ID NO: 1788 - DNA, 23 bp, synthetic construct
  misc_feature 1..23: note = Description of Artificial Sequence: Synthetic expected off-target sequence
  source 1..23: mol_type = other DNA
gagttagagcagaagaagaaagg

SEQ ID NO: 1789 - DNA, 25 bp, synthetic construct
  misc_feature 1..25: note = Description of Artificial Sequence: Synthetic PCR primer
  source 1..25: mol_type = other DNA
tctctccttcaactcatgaccagct

SEQ ID NO: 1790 - DNA, 27 bp, synthetic construct
  misc_feature 1..27: note = Description of Artificial Sequence: Synthetic PCR primer
  source 1..27: mol_type = other DNA
atctgcacatgtatgtacaggagtcat

SEQ ID NO: 1791 - DNA, 23 bp, synthetic construct
  misc_feature 1..23: note = Description of Artificial Sequence: Synthetic expected off-target sequence
  source 1..23: mol_type = other DNA
aagtcagaggagaagaagaaggg

SEQ ID NO: 1792 - DNA, 23 bp, synthetic construct
  misc_feature 1..23: note = Description of Artificial Sequence: Synthetic PCR primer
  source 1..23: mol_type = other DNA
tggggaatctccaaagaaccccc

SEQ ID NO: 1793 - DNA, 24 bp, synthetic construct
  misc_feature 1..24: note = Description of Artificial Sequence: Synthetic PCR primer
  source 1..24: mol_type = other DNA
agggtgtactgtgggaactttgca

SEQ ID NO: 1794 - DNA, 23 bp, synthetic construct
  misc_feature 1..23: note = Description of Artificial Sequence: Synthetic expected off-target sequence
  source 1..23: mol_type = other DNA
aagtccgaggagaggaagaaagg

SEQ ID NO: 1795 - DNA, 20 bp, synthetic construct
  misc_feature 1..20: note = Description of Artificial Sequence: Synthetic PCR primer
  source 1..20: mol_type = other DNA
gatggccccactgagcacgt

SEQ ID NO: 1796 - DNA, 26 bp, synthetic construct
  misc_feature 1..26: note = Description of Artificial Sequence: Synthetic PCR primer
  source 1..26: mol_type = other DNA
acttcgtagagccttaaacatgtggc

SEQ ID NO: 1797 - DNA, 23 bp, synthetic construct
  misc_feature 1..23: note = Description of Artificial Sequence: Synthetic expected off-target sequence
  source 1..23: mol_type = other DNA
aagtctgagcacaagaagaatgg

SEQ ID NO: 1798 - DNA, 27 bp, synthetic construct
  misc_feature 1..27: note = Description of Artificial Sequence: Synthetic PCR primer
  source 1..27: mol_type = other DNA
aggattaatgtttaaagtcactggtgg

SEQ ID NO: 1799 - DNA, 23 bp, synthetic construct
  misc_feature 1..23: note = Description of Artificial Sequence: Synthetic PCR primer
  source 1..23: mol_type = other DNA
tcaaacaaggtgcagatacagca

SEQ ID NO: 1800 - DNA, 23 bp, synthetic construct
  misc_feature 1..23: note = Description of Artificial Sequence: Synthetic expected off-target sequence
  source 1..23: mol_type = other DNA
acgtctgagcagaagaagaatgg

SEQ ID NO: 1801 - DNA, 24 bp, synthetic construct
  misc_feature 1..24: note = Description of Artificial Sequence: Synthetic PCR primer
  source 1..24: mol_type = other DNA
tccaagccactggtttctcagtca

SEQ ID NO: 1802 - DNA, 26 bp, synthetic construct
  misc_feature 1..26: note = Description of Artificial Sequence: Synthetic PCR primer
  source 1..26: mol_type = other DNA
tgctctgtggatcatattttggggga

SEQ ID NO: 1803 - DNA, 23 bp, synthetic construct
  misc_feature 1..23: note = Description of Artificial Sequence: Synthetic expected off-target sequence
  source 1..23: mol_type = other DNA
gactcctagcaaaagaagaatgg

SEQ ID NO: 1804 - DNA, 22 bp, synthetic construct
  misc_feature 1..22: note = Description of Artificial Sequence: Synthetic PCR primer
  source 1..22: mol_type = other DNA
actttcagagcttggggcaggt

SEQ ID NO: 1805 - DNA, 21 bp, synthetic construct
  misc_feature 1..21: note = Description of Artificial Sequence: Synthetic PCR primer
  source 1..21: mol_type = other DNA
cccacgctgaagtgcaatggc

SEQ ID NO: 1806 - DNA, 23 bp, synthetic construct
  misc_feature 1..23: note = Description of Artificial Sequence: Synthetic expected off-target sequence
  source 1..23: mol_type = other DNA
gagactgagaagaagaagaaagg

SEQ ID NO: 1807 - DNA, 20 bp, synthetic construct
  misc_feature 1..20: note = Description of Artificial Sequence: Synthetic PCR primer
  source 1..20: mol_type = other DNA
caaagcatgcctttcagccg

SEQ ID NO: 1808 - DNA, 20 bp, synthetic construct
  misc_feature 1..20: note = Description of Artificial Sequence: Synthetic PCR primer
  source 1..20: mol_type = other DNA
ggctcttcgatttggcacct

SEQ ID NO: 1809 - DNA, 23 bp, synthetic construct
  misc_feature 1..23: note = Description of Artificial Sequence: Synthetic expected off-target sequence
  source 1..23: mol_type = other DNA
gagccggagcagaagaaggaggg

SEQ ID NO: 1810 - DNA, 23 bp, synthetic construct
  misc_feature 1..23: note = Description of Artificial Sequence: Synthetic expected off-target sequence
  source 1..23: mol_type = other DNA
gagcctgagcagaaggagaaggg

SEQ ID NO: 1811 - DNA, 20 bp, synthetic construct
  misc_feature 1..20: note = Description of Artificial Sequence: Synthetic PCR primer
  source 1..20: mol_type = other DNA
ggactccctgcagctccagc

SEQ ID NO: 1812 - DNA, 20 bp, synthetic construct
  misc_feature 1..20: note = Description of Artificial Sequence: Synthetic PCR primer
  source 1..20: mol_type = other DNA
aggaacacaggccaggctgg

SEQ ID NO: 1813 - DNA, 23 bp, synthetic construct
  misc_feature 1..23: note = Description of Artificial Sequence: Synthetic expected off-target sequence
  source 1..23: mol_type = other DNA
gaggccgagcagaagaaagacgg

SEQ ID NO: 1814 - DNA, 20 bp, synthetic construct
  misc_feature 1..20: note = Description of Artificial Sequence: Synthetic PCR primer
  source 1..20: mol_type = other DNA
ccctttaggcaccttcccca

SEQ ID NO: 1815 - DNA, 20 bp, synthetic construct
  misc_feature 1..20: note = Description of Artificial Sequence: Synthetic PCR primer
  source 1..20: mol_type = other DNA
ccgaccttcatccctcctgg

SEQ ID NO: 1816 - DNA, 23 bp, synthetic construct
  misc_feature 1..23: note = Description of Artificial Sequence: Synthetic expected off-target sequence
  source 1..23: mol_type = other DNA
gagtaagagaagaagaagaaggg

SEQ ID NO: 1817 - DNA, 24 bp, synthetic construct
  misc_feature 1..24: note = Description of Artificial Sequence: Synthetic PCR primer
  source 1..24: mol_type = other DNA
tgattctgccttagagtcccaggt

SEQ ID NO: 1818 - DNA, 21 bp, synthetic construct
  misc_feature 1..21: note = Description of Artificial Sequence: Synthetic PCR primer
  source 1..21: mol_type = other DNA
tgggctctgtgtccctaccca

SEQ ID NO: 1819 - DNA, 23 bp, synthetic construct
  misc_feature 1..23: note = Description of Artificial Sequence: Synthetic expected off-target sequence
  source 1..23: mol_type = other DNA
gagtaggaggagaagaagaaagg

SEQ ID NO: 1820 - DNA, 23 bp, synthetic construct
  misc_feature 1..23: note = Description of Artificial Sequence: Synthetic expected off-target sequence
  source 1..23: mol_type = other DNA
gagtccgggaaggagaagaaagg

SEQ ID NO: 1821 - DNA, 20 bp, synthetic construct
  misc_feature 1..20: note = Description of Artificial Sequence: Synthetic PCR primer
  source 1..20: mol_type = other DNA
aggcaggagagcaagcaggt

SEQ ID NO: 1822 - DNA, 23 bp, synthetic construct
  misc_feature 1..23: note = Description of Artificial Sequence: Synthetic PCR primer
  source 1..23: mol_type = other DNA
accctgactactgactgaccgct

SEQ ID NO: 1823 - DNA, 23 bp, synthetic construct
  misc_feature 1..23: note = Description of Artificial Sequence: Synthetic expected off-target sequence
  source 1..23: mol_type = other DNA
gattcctaccagaagaagaatgg

SEQ ID NO: 1824 - DNA, 20 bp, synthetic construct
  misc_feature 1..20: note = Description of Artificial Sequence: Synthetic PCR primer
  source 1..20: mol_type = other DNA
ctccccattgcgacccgagg

SEQ ID NO: 1825 - DNA, 23 bp, synthetic construct
  misc_feature 1..23: note = Description of Artificial Sequence: Synthetic PCR primer
  source 1..23: mol_type = other DNA
agaggcattgacttggagcacct

SEQ ID NO: 1826 - DNA, 23 bp, synthetic construct
  misc_feature 1..23: note = Description of Artificial Sequence: Synthetic expected off-target sequence
  source 1..23: mol_type = other DNA
gcgacagagcagaagaagaaggg

SEQ ID NO: 1827 - DNA, 20 bp, synthetic construct
  misc_feature 1..20: note = Description of Artificial Sequence: Synthetic PCR primer
  source 1..20: mol_type = other DNA
ctggagcccagcaggaaggc

SEQ ID NO: 1828 - DNA, 20 bp, synthetic construct
  misc_feature 1..20: note = Description of Artificial Sequence: Synthetic PCR primer
  source 1..20: mol_type = other DNA
cctcagggagggggcctgat

SEQ ID NO: 1829 - DNA, 23 bp, synthetic construct
  misc_feature 1..23: note = Description of Artificial Sequence: Synthetic expected off-target sequence
  source 1..23: mol_type = other DNA
aaatccaaccagaagaagaaagg

SEQ ID NO: 1830 - DNA, 20 bp, synthetic construct
  misc_feature 1..20: note = Description of Artificial Sequence: Synthetic PCR primer
  source 1..20: mol_type = other DNA
actgtgggcgttgtccccac

SEQ ID NO: 1831 - DNA, 22 bp, synthetic construct
  misc_feature 1..22: note = Description of Artificial Sequence: Synthetic PCR primer
  source 1..22: mol_type = other DNA
aggtcggtgcagggtttaagga

SEQ ID NO: 1832 - DNA, 23 bp, synthetic construct
  misc_feature 1..23: note = Description of Artificial Sequence: Synthetic expected off-target sequence
  source 1..23: mol_type = other DNA
aagtctgaggacaagaagaatgg

SEQ ID NO: 1833 - DNA, 22 bp, synthetic construct
  misc_feature 1..22: note = Description of Artificial Sequence: Synthetic PCR primer
  source 1..22: mol_type = other DNA
ggcgctccctttttccctttgt

SEQ ID NO: 1834 - DNA, 21 bp, synthetic construct
  misc_feature 1..21: note = Description of Artificial Sequence: Synthetic PCR primer
  source 1..21: mol_type = other DNA
cgtcacccatcgtctcgtgga

SEQ ID NO: 1835 - DNA, 23 bp, synthetic construct
  misc_feature 1..23: note = Description of Artificial Sequence: Synthetic expected off-target sequence
  source 1..23: mol_type = other DNA
aagttggagcaggagaagaaggg

SEQ ID NO: 1836 - DNA, 21 bp, synthetic construct
  misc_feature 1..21: note = Description of Artificial Sequence: Synthetic PCR primer
  source 1..21: mol_type = other DNA
tgccatctatagcagccccct

SEQ ID NO: 1837 - DNA, 27 bp, synthetic construct
  misc_feature 1..27: note = Description of Artificial Sequence: Synthetic PCR primer
  source 1..27: mol_type = other DNA
gcatcttgctaaccgtacttcttctga

SEQ ID NO: 1838 - DNA, 23 bp, synthetic construct
  misc_feature 1..23: note = Description of Artificial Sequence: Synthetic expected off-target sequence
  source 1..23: mol_type = other DNA
aatacagagcagaagaagaatgg

SEQ ID NO: 1839 - DNA, 24 bp, synthetic construct
  misc_feature 1..24: note = Description of Artificial Sequence: Synthetic PCR primer
  source 1..24: mol_type = other DNA
gtggagacgctaaacctgtgaggt

SEQ ID NO: 1840 - DNA, 22 bp, synthetic construct
  misc_feature 1..22: note = Description of Artificial Sequence: Synthetic PCR primer
  source 1..22: mol_type = other DNA
gctcctggcctcttcctacagc

SEQ ID NO: 1841 - DNA, 23 bp, synthetic construct
  misc_feature 1..23: note = Description of Artificial Sequence: Synthetic expected off-target sequence
  source 1..23: mol_type = other DNA
aggtactagcagaagaagaaagg

SEQ ID NO: 1842 - DNA, 24 bp, synthetic construct
  misc_feature 1..24: note = Description of Artificial Sequence: Synthetic PCR primer
  source 1..24: mol_type = other DNA
ccgaacttctgctgagcttgatgc

SEQ ID NO: 1843 - DNA, 23 bp, synthetic construct
  misc_feature 1..23: note = Description of Artificial Sequence: Synthetic PCR primer
  source 1..23: mol_type = other DNA
ccaagtcaatgggcaacaaggga

SEQ ID NO: 1844 - DNA, 23 bp, synthetic construct
  misc_feature 1..23: note = Description of Artificial Sequence: Synthetic expected off-target sequence
  source 1..23: mol_type = other DNA
aggtgctagcagaagaagaaggg

SEQ ID NO: 1845 - DNA, 23 bp, synthetic construct
  misc_feature 1..23: note = Description of Artificial Sequence: Synthetic expected off-target sequence
  source 1..23: mol_type = other DNA
aggtgggagcagaagaagaaggg

SEQ ID NO: 1846 - DNA, 20 bp, synthetic construct
  misc_feature 1..20: note = Description of Artificial Sequence: Synthetic PCR primer
  source 1..20: mol_type = other DNA
tgcccccaagacctttctcc

SEQ ID NO: 1847 - DNA, 20 bp, synthetic construct
  misc_feature 1..20: note = Description of Artificial Sequence: Synthetic PCR primer
  source 1..20: mol_type = other DNA
atggcaggcagaggaggaag

SEQ ID NO: 1848 - DNA, 23 bp, synthetic construct
  misc_feature 1..23: note = Description of Artificial Sequence: Synthetic expected off-target sequence
  source 1..23: mol_type = other DNA
caaacggagcagaagaagaaagg

SEQ ID NO: 1849 - DNA, 20 bp, synthetic construct
  misc_feature 1..20: note = Description of Artificial Sequence: Synthetic PCR primer
  source 1..20: mol_type = other DNA
gggtggggccattgtgggtt

SEQ ID NO: 1850 - DNA, 20 bp, synthetic construct
  misc_feature 1..20: note = Description of Artificial Sequence: Synthetic PCR primer
  source 1..20: mol_type = other DNA
ctggggccagggtttctgcc

SEQ ID NO: 1851 - DNA, 23 bp, synthetic construct
  misc_feature 1..23: note = Description of Artificial Sequence: Synthetic expected off-target sequence
  source 1..23: mol_type = other DNA
cactctgaggagaagaagaaagg

SEQ ID NO: 1852 - DNA, 23 bp, synthetic construct
  misc_feature 1..23: note = Description of Artificial Sequence: Synthetic PCR primer
  source 1..23: mol_type = other DNA
tggagaacatgagaggcttgcaa

SEQ ID NO: 1853 - DNA, 24 bp, synthetic construct
  misc_feature 1..24: note = Description of Artificial Sequence: Synthetic PCR primer
  source 1..24: mol_type = other DNA
tccttctgtaggcaatgggaacaa

SEQ ID NO: 1854 - DNA, 23 bp, synthetic construct
  misc_feature 1..23: note = Description of Artificial Sequence: Synthetic expected off-target sequence
  source 1..23: mol_type = other DNA
cagtcatggcagaagaagaaagg

SEQ ID NO: 1855 - DNA, 20 bp, synthetic construct
  misc_feature 1..20: note = Description of Artificial Sequence: Synthetic PCR primer
  source 1..20: mol_type = other DNA
gccacatggtagaagtcggc

SEQ ID NO: 1856 - DNA, 20 bp, synthetic construct
  misc_feature 1..20: note = Description of Artificial Sequence: Synthetic PCR primer
  source 1..20: mol_type = other DNA
ggcagatttcccccatgctg

SEQ ID NO: 1857 - DNA, 23 bp, synthetic construct
  misc_feature 1..23: note = Description of Artificial Sequence: Synthetic expected off-target sequence
  source 1..23: mol_type = other DNA
ccgtcccagcagtagaagaatgg

SEQ ID NO: 1858 - DNA, 20 bp, synthetic construct
  misc_feature 1..20: note = Description of Artificial Sequence: Synthetic PCR primer
  source 1..20: mol_type = other DNA
tgtacaccccaagtcctccc

SEQ ID NO: 1859 - DNA, 20 bp, synthetic construct
  misc_feature 1..20: note = Description of Artificial Sequence: Synthetic PCR primer
  source 1..20: mol_type = other DNA
aaggggagtgtgcaagcctc

SEQ ID NO: 1860 - DNA, 23 bp, synthetic construct
  misc_feature 1..23: note = Description of Artificial Sequence: Synthetic expected off-target sequence
  source 1..23: mol_type = other DNA
gtctgcgatcagaagaagaaagg

SEQ ID NO: 1861 - DNA, 22 bp, synthetic construct
  misc_feature 1..22: note = Description of Artificial Sequence: Synthetic PCR primer
  source 1..22: mol_type = other DNA
aggtctggctagagatgcagca

SEQ ID NO: 1862 - DNA, 24 bp, synthetic construct
  misc_feature 1..24: note = Description of Artificial Sequence: Synthetic PCR primer
  source 1..24: mol_type = other DNA
agtccaacactcaggtgagaccct

SEQ ID NO: 1863 - DNA, 23 bp, synthetic construct
  misc_feature 1..23: note = Description of Artificial Sequence: Synthetic expected off-target sequence
  source 1..23: mol_type = other DNA
taatccaatcagaagaagaaggg

SEQ ID NO: 1864 - DNA, 22 bp, synthetic construct
  misc_feature 1..22: note = Description of Artificial Sequence: Synthetic PCR primer
  source 1..22: mol_type = other DNA
ccaagaggacccagctgttgga

SEQ ID NO: 1865 - DNA, 27 bp, synthetic construct
  misc_feature 1..27: note = Description of Artificial Sequence: Synthetic PCR primer
  source 1..27: mol_type = other DNA
gggtatggaattctggattagcagagc

SEQ ID NO: 1866 - DNA, 23 bp, synthetic construct
  misc_feature 1..23: note = Description of Artificial Sequence: Synthetic expected off-target sequence
  source 1..23: mol_type = other DNA
tatacggagcagaagaagaatgg

SEQ ID NO: 1867 - DNA, 26 bp, synthetic construct
  misc_feature 1..26: note = Description of Artificial Sequence: Synthetic PCR primer
  source 1..26: mol_type = other DNA
accatctcttcattgatgagtcccaa

SEQ ID NO: 1868 - DNA, 22 bp, synthetic construct
  misc_feature 1..22: note = Description of Artificial Sequence: Synthetic PCR primer
  source 1..22: mol_type = other DNA
acactgtgagtatgcttggcgt

SEQ ID NO: 1869 - DNA, 23 bp, synthetic construct
  misc_feature 1..23: note = Description of Artificial Sequence: Synthetic expected off-target sequence
  source 1..23: mol_type = other DNA
acttccctgcagaagaagaaagg

SEQ ID NO: 1870 - DNA, 20 bp, synthetic construct
  misc_feature 1..20: note = Description of Artificial Sequence: Synthetic PCR primer
  source 1..20: mol_type = other DNA
ggctgcggggagatgagctc

SEQ ID NO: 1871 - DNA, 22 bp, synthetic construct
  misc_feature 1..22: note = Description of Artificial Sequence: Synthetic PCR primer
  source 1..22: mol_type = other DNA
tcggatgcttttccacagggct

SEQ ID NO: 1872 - DNA, 23 bp, synthetic construct
  misc_feature 1..23: note = Description of Artificial Sequence: Synthetic expected off-target sequence
  source 1..23: mol_type = other DNA
aggactgggcagaagaagaaggg

SEQ ID NO: 1873 - DNA, 20 bp, synthetic construct
  misc_feature 1..20: note = Description of Artificial Sequence: Synthetic PCR primer
  source 1..20: mol_type = other DNA
tcttccaggagggcagctcc

SEQ ID NO: 1874 - DNA, 24 bp, synthetic construct
  misc_feature 1..24: note = Description of Artificial Sequence: Synthetic PCR primer
  source 1..24: mol_type = other DNA
ccaatcctgagctcctacaaggct

SEQ ID NO: 1875 - DNA, 23 bp, synthetic construct
  misc_feature 1..23: note = Description of Artificial Sequence: Synthetic expected off-target sequence
  source 1..23: mol_type = other DNA
aggttggagaagaagaagaaggg

SEQ ID NO: 1876 - DNA, 20 bp, synthetic construct
  misc_feature 1..20: note = Description of Artificial Sequence: Synthetic PCR primer
  source 1..20: mol_type = other DNA
gagctgcactggatggcact

SEQ ID NO: 1877 - DNA, 23 bp, synthetic construct
  misc_feature 1..23: note = Description of Artificial Sequence: Synthetic PCR primer
  source 1..23: mol_type = other DNA
tgctggttaaggggtgttttgga

SEQ ID NO: 1878 - DNA, 23 bp, synthetic construct
  misc_feature 1..23: note = Description of Artificial Sequence: Synthetic expected off-target sequence
  source 1..23: mol_type = other DNA
agttcagagcaggagaagaatgg

SEQ ID NO: 1879 - DNA, 21 bp, synthetic construct
  misc_feature 1..21: note = Description of Artificial Sequence: Synthetic PCR primer
  source 1..21: mol_type = other DNA
tctgggaaggtgaggaggcca

SEQ ID NO: 1880 - DNA, 24 bp, synthetic construct
  misc_feature 1..24: note = Description of Artificial Sequence: Synthetic PCR primer
  source 1..24: mol_type = other DNA
tgggggacaatggaaaagcaatga

SEQ ID NO: 1881 - DNA, 23 bp, synthetic construct
  misc_feature 1..23: note = Description of Artificial Sequence: Synthetic expected off-target sequence
  source 1..23: mol_type = other DNA
atgacacagcagaagaagaaggg

SEQ ID NO: 1882 - DNA, 20 bp, synthetic construct
  misc_feature 1..20: note = Description of Artificial Sequence: Synthetic PCR primer
  source 1..20: mol_type = other DNA
cttgctcccagcctgacccc

SEQ ID NO: 1883 - DNA, 20 bp, synthetic construct
  misc_feature 1..20: note = Description of Artificial Sequence: Synthetic PCR primer
  source 1..20: mol_type = other DNA
agcccttgccatgcaggacc

SEQ ID NO: 1884 - DNA, 23 bp, synthetic construct
  misc_feature 1..23: note = Description of Artificial Sequence: Synthetic expected off-target sequence
  source 1..23: mol_type = other DNA
atgacagagaagaagaagaaagg

SEQ ID NO: 1885 - DNA, 25 bp, synthetic construct
  misc_feature 1..25: note = Description of Artificial Sequence: Synthetic PCR primer
  source 1..25: mol_type = other DNA
gggatttttatctgttgggtgcgaa

SEQ ID NO: 1886 - DNA, 24 bp, synthetic construct
  misc_feature 1..24: note = Description of Artificial Sequence: Synthetic PCR primer
  source 1..24: mol_type = other DNA
aaccacagatgtaccctcaaagct

SEQ ID NO: 1887 - DNA, 23 bp, synthetic construct
  misc_feature 1..23: note = Description of Artificial Sequence: Synthetic expected off-target sequence
  source 1..23: mol_type = other DNA
ccgcccctgcagaagaagaacgg

SEQ ID NO: 1888 - DNA, 20 bp, synthetic construct
  misc_feature 1..20: note = Description of Artificial Sequence: Synthetic PCR primer
  source 1..20: mol_type = other DNA
acccatcaggaccgcagcac

SEQ ID NO: 1889 - DNA, 20 bp, synthetic construct
  misc_feature 1..20: note = Description of Artificial Sequence: Synthetic PCR primer
  source 1..20: mol_type = other DNA
tctggaacctgggaggcgga

SEQ ID NO: 1890 - DNA, 23 bp, synthetic construct
  misc_feature 1..23: note = Description of Artificial Sequence: Synthetic expected off-target sequence
  source 1..23: mol_type = other DNA
gcaggagagcagaagaagaaagg

SEQ ID NO: 1891 - DNA, 20 bp, synthetic construct
  misc_feature 1..20: note = Description of Artificial Sequence: Synthetic PCR primer
  source 1..20: mol_type = other DNA
cgtccctcacagccagcctc

SEQ ID NO: 1892 - DNA, 20 bp, synthetic construct
  misc_feature 1..20: note = Description of Artificial Sequence: Synthetic PCR primer
  source 1..20: mol_type = other DNA
cctccttgggcctggggttc

SEQ ID NO: 1893 - DNA, 23 bp, synthetic construct
  misc_feature 1..23: note = Description of Artificial Sequence: Synthetic expected off-target sequence
  source 1..23: mol_type = other DNA
gttcaagagcagaagaagaatgg

SEQ ID NO: 1894 - DNA, 22 bp, synthetic construct
  misc_feature 1..22: note = Description of Artificial Sequence: Synthetic PCR primer
  source 1..22: mol_type = other DNA
ccctctgcaaggtggagtctcc

SEQ ID NO: 1895 - DNA, 21 bp, synthetic construct
  misc_feature 1..21: note = Description of Artificial Sequence: Synthetic PCR primer
  source 1..21: mol_type = other DNA
agatgttctgtccccaggcct

SEQ ID NO: 1896 - DNA, 23 bp, synthetic construct
  misc_feature 1..23: note = Description of Artificial Sequence: Synthetic expected off-target sequence
  source 1..23: mol_type = other DNA
gttttgaagcagaagaagaaagg

SEQ ID NO: 1897 - DNA, 21 bp, synthetic construct
  misc_feature 1..21: note = Description of Artificial Sequence: Synthetic PCR primer
  source 1..21: mol_type = other DNA
ggcttccactgctgaaggcct

SEQ ID NO: 1898 - DNA, 20 bp, synthetic construct
  misc_feature 1..20: note = Description of Artificial Sequence: Synthetic PCR primer
  source 1..20: mol_type = other DNA
tgccgctccacataccctcc

SEQ ID NO: 1899 - DNA, 23 bp, synthetic construct
  misc_feature 1..23: note = Description of Artificial Sequence: Synthetic expected off-target sequence
  source 1..23: mol_type = other DNA
tatggcaagcagaagaagaaagg

SEQ ID NO: 1900 - DNA, 22 bp, synthetic construct
  misc_feature 1..22: note = Description of Artificial Sequence: Synthetic PCR primer
  source 1..22: mol_type = other DNA
agcattgcctgtcgggtgatgt

SEQ ID NO: 1901 - DNA, 25 bp, synthetic construct
  misc_feature 1..25: note = Description of Artificial Sequence: Synthetic PCR primer
  source 1..25: mol_type = other DNA
agcacctattggacactggttctct

SEQ ID NO: 1902 - DNA, 23 bp, synthetic construct
  misc_feature 1..23: note = Description of Artificial Sequence: Synthetic expected off-target sequence
  source 1..23: mol_type = other DNA
tggtgggatcagaagaagaaagg

SEQ ID NO: 1903 - DNA, 21 bp, synthetic construct
  misc_feature 1..21: note = Description of Artificial Sequence: Synthetic PCR primer
  source 1..21: mol_type = other DNA
tctagagcaggggcacaatgc

SEQ ID NO: 1904 - DNA, 21 bp, synthetic construct
  misc_feature 1..21: note = Description of Artificial Sequence: Synthetic PCR primer
  source 1..21: mol_type = other DNA
tggagatggagcctggtggga

SEQ ID NO: 1905 - DNA, 23 bp, synthetic construct
  misc_feature 1..23: note = Description of Artificial Sequence: Synthetic expected off-target sequence
  source 1..23: mol_type = other DNA
acccacgggcagaagaagaaggg

SEQ ID NO: 1906 - DNA, 27 bp, synthetic construct
  misc_feature 1..27: note = Description of Artificial Sequence: Synthetic PCR primer
  source 1..27: mol_type = other DNA
ggtctcagaaaatggagagaaagcacg

SEQ ID NO: 1907 - DNA, 20 bp, synthetic construct
  misc_feature 1..20: note = Description of Artificial Sequence: Synthetic PCR primer
  source 1..20: mol_type = other DNA
cccacagaaacctgggccct

SEQ ID NO: 1908 - DNA, 23 bp, synthetic construct
  misc_feature 1..23: note = Description of Artificial Sequence: Synthetic expected off-target sequence
  source 1..23: mol_type = other DNA
actcctgatcagaagaagaaggg

SEQ ID NO: 1909 - DNA, 26 bp, synthetic construct
  misc_feature 1..26: note = Description of Artificial Sequence: Synthetic PCR primer
  source 1..26: mol_type = other DNA
ggttgctgataccaaaacgtttgcct

SEQ ID NO: 1910 - DNA, 21 bp, synthetic construct
  misc_feature 1..21: note = Description of Artificial Sequence: Synthetic PCR primer
  source 1..21: mol_type = other DNA
tgggtcctctccacctctgca

SEQ ID NO: 1911 - DNA, 23 bp, synthetic construct
  misc_feature 1..23: note = Description of Artificial Sequence: Synthetic expected off-target sequence
  source 1..23: mol_type = other DNA
actgatgagcagaagaagaaagg

SEQ ID NO: 1912 - DNA, 27 bp, synthetic construct
  misc_feature 1..27: note = Description of Artificial Sequence: Synthetic PCR primer
  source 1..27: mol_type = other DNA
actctccttaagtactgatatggctgt

SEQ ID NO: 1913 - DNA, 22 bp, synthetic construct
  misc_feature 1..22: note = Description of Artificial Sequence: Synthetic PCR primer
  source 1..22: mol_type = other DNA
cagaatcttgctctgttgccca

SEQ ID NO: 1914 - DNA, 23 bp, synthetic construct
  misc_feature 1..23: note = Description of Artificial Sequence: Synthetic expected off-target sequence
  source 1..23: mol_type = other DNA
attttagtgcagaagaagaaagg

SEQ ID NO: 1915 - DNA, 23 bp, synthetic construct
  misc_feature 1..23: note = Description of Artificial Sequence: Synthetic expected off-target sequence
  source 1..23: mol_type = other DNA
attttagtgcagaagaagaaagg

SEQ ID NO: 1916 - DNA, 23 bp, synthetic construct
  misc_feature 1..23: note = Description of Artificial Sequence: Synthetic expected off-target sequence
  source 1..23: mol_type = other DNA
ccatggcagcagaagaagaaggg

SEQ ID NO: 1917 - DNA, 21 bp, synthetic construct
  misc_feature 1..21: note = Description of Artificial Sequence: Synthetic PCR primer
  source 1..21: mol_type = other DNA
caatgcctgcagtcctcagga

SEQ ID NO: 1918 - DNA, 26 bp, synthetic construct
  misc_feature 1..26: note = Description of Artificial Sequence: Synthetic PCR primer
  source 1..26: mol_type = other DNA
tcccaagagaaaactctgtcctgaca

SEQ ID NO: 1919 - DNA, 23 bp, synthetic construct
  misc_feature 1..23: note = Description of Artificial Sequence: Synthetic expected off-target sequence
  source 1..23: mol_type = other DNA
ccattacagcagaagaagaaggg

SEQ ID NO: 1920 - DNA, 20 bp, synthetic construct
  misc_feature 1..20: note = Description of Artificial Sequence: Synthetic PCR primer
  source 1..20: mol_type = other DNA
gcattggctgcccagggaaa

SEQ ID NO: 1921 - DNA, 20 bp, synthetic construct
  misc_feature 1..20: note = Description of Artificial Sequence: Synthetic PCR primer
  source 1..20: mol_type = other DNA
tggctgtgctgggctgtgtt

SEQ ID NO: 1922 - DNA, 23 bp, synthetic construct
  misc_feature 1..23: note = Description of Artificial Sequence: Synthetic expected off-target sequence
  source 1..23: mol_type = other DNA
cgaggcgggcagaagaagaaagg

SEQ ID NO: 1923 - DNA, 21 bp, synthetic construct
  misc_feature 1..21: note = Description of Artificial Sequence: Synthetic PCR primer
  source 1..21: mol_type = other DNA
ccacaagcctcagcctacccg

SEQ ID NO: 1924 - DNA, 21 bp, synthetic construct
  misc_feature 1..21: note = Description of Artificial Sequence: Synthetic PCR primer
  source 1..21: mol_type = other DNA
acaggtgccaaaacactgcct

SEQ ID NO: 1925 - DNA, 23 bp, synthetic construct
  misc_feature 1..23: note = Description of Artificial Sequence: Synthetic expected off-target sequence
  source 1..23: mol_type = other DNA
tcattgcagcagaagaagaaagg

SEQ ID NO: 1926 - DNA, 25 bp, synthetic construct
  misc_feature 1..25: note = Description of Artificial Sequence: Synthetic PCR primer
  source 1..25: mol_type = other DNA
gcctcttgcaaatgagactcctttt

SEQ ID NO: 1927 - DNA, 20 bp, synthetic construct
  misc_feature 1..20: note = Description of Artificial Sequence: Synthetic PCR primer
  source 1..20: mol_type = other DNA
cgatcagtcccctggcgtcc

SEQ ID NO: 1928 - DNA, 23 bp, synthetic construct
  misc_feature 1..23: note = Description of Artificial Sequence: Synthetic expected off-target sequence
  source 1..23: mol_type = other DNA
tctccagggcagaagaagaaagg

SEQ ID NO: 1929 - DNA, 20 bp, synthetic construct
  misc_feature 1..20: note = Description of Artificial Sequence: Synthetic PCR primer
  source 1..20: mol_type = other DNA
tcccagaatctgcctccgca

SEQ ID NO: 1930 - DNA, 21 bp, synthetic construct
  misc_feature 1..21: note = Description of Artificial Sequence: Synthetic PCR primer
  source 1..21: mol_type = other DNA
aggggtttccaggcacatggg

SEQ ID NO: 1931-1933 - skipped (3 entries)

SEQ ID NO: 1934 - DNA, 23 bp, synthetic construct
  misc_feature 1..23: note = Description of Artificial Sequence: Synthetic expected off-target sequence
  source 1..23: mol_type = other DNA
gtcatcttagtcattacctgagg

SEQ ID NO: 1935 - DNA, 30 bp, synthetic construct; identical to SEQ ID NO: 652
  misc_feature 1..30: note = Description of Artificial Sequence: Synthetic PCR primer
  source 1..30: mol_type = other DNA

SEQ ID NO: 1936 - DNA, 30 bp, synthetic construct; identical to SEQ ID NO: 963
  misc_feature 1..30: note = Description of Artificial Sequence: Synthetic PCR primer
  source 1..30: mol_type = other DNA

SEQ ID NO: 1937 - DNA, 23 bp, synthetic construct
  misc_feature 1..23: note = Description of Artificial Sequence: Synthetic expected off-target sequence
  source 1..23: mol_type = other DNA
ggtatctaagtcattacctgtgg

SEQ ID NO: 1938 - DNA, 26 bp, synthetic construct
  misc_feature 1..26: note = Description of Artificial Sequence: Synthetic PCR primer
  source 1..26: mol_type = other DNA
acatctggggaaagcaaaagtcaaca

SEQ ID NO: 1939 - DNA, 27 bp, synthetic construct
  misc_feature 1..27: note = Description of Artificial Sequence: Synthetic PCR primer
  source 1..27: mol_type = other DNA
tgtctgagtatctaggctaaaagtggt

SEQ ID NO: 1940 - DNA, 23 bp, synthetic construct
  misc_feature 1..23: note = Description of Artificial Sequence: Synthetic expected off-target sequence
  source 1..23: mol_type = other DNA
gtaatattagtcattaccggtgg

SEQ ID NO: 1941 - DNA, 26 bp, synthetic construct
  misc_feature 1..26: note = Description of Artificial Sequence: Synthetic PCR primer
  source 1..26: mol_type = other DNA
acgatcttgcttcatttccctgtaca

SEQ ID NO: 1942 - DNA, 27 bp, synthetic construct
  misc_feature 1..27: note = Description of Artificial Sequence: Synthetic PCR primer
  source 1..27: mol_type = other DNA
agtgctttgtgaactgaaaagcaaaca

SEQ ID NO: 1943 - DNA, 23 bp, synthetic construct
  misc_feature 1..23: note = Description of Artificial Sequence: Synthetic expected off-target sequence
  source 1..23: mol_type = other DNA
gtaatctgagtcatttcctgggg

SEQ ID NO: 1944 - DNA, 23 bp, synthetic construct
  misc_feature 1..23: note = Description of Artificial Sequence: Synthetic PCR primer
  source 1..23: mol_type = other DNA
gcaccttggtgctgctaaatgcc

SEQ ID NO: 1945 - DNA, 24 bp, synthetic construct
  misc_feature 1..24: note = Description of Artificial Sequence: Synthetic PCR primer
  source 1..24: mol_type = other DNA
gggcaactgaacaggcatgaatgg

SEQ ID NO: 1946 - DNA, 23 bp, synthetic construct
  misc_feature 1..23: note = Description of Artificial Sequence: Synthetic expected off-target sequence
  source 1..23: mol_type = other DNA
gtcatcctagtcatttactgggg

SEQ ID NO: 1947 - DNA, 20 bp, synthetic construct
  misc_feature 1..20: note = Description of Artificial Sequence: Synthetic PCR primer
  source 1..20: mol_type = other DNA
aactgtcctgcatccccgcc

SEQ ID NO: 1948 - DNA, 20 bp, synthetic construct
  misc_feature 1..20: note = Description of Artificial Sequence: Synthetic PCR primer
  source 1..20: mol_type = other DNA
ggtgcacctggatccaccca

SEQ ID NO: 1949 - DNA, 23 bp, synthetic construct
  misc_feature 1..23: note = Description of Artificial Sequence: Synthetic expected off-target sequence
  source 1..23: mol_type = other DNA
gtcatcctagtgcttacctgagg

SEQ ID NO: 1950-1951 - skipped (2 entries)

SEQ ID NO: 1952 - DNA, 23 bp, synthetic construct
  misc_feature 1..23: note = Description of Artificial Sequence: Synthetic expected off-target sequence
  source 1..23: mol_type = other DNA
gtcatctgaggcattaactgggg

SEQ ID NO: 1953 - DNA, 20 bp, synthetic construct
  misc_feature 1..20: note = Description of Artificial Sequence: Synthetic PCR primer
  source 1..20: mol_type = other DNA
catcaccctccaccaggccc

SEQ ID NO: 1954 - DNA, 20 bp, synthetic construct
  misc_feature 1..20: note = Description of Artificial Sequence: Synthetic PCR primer
  source 1..20: mol_type = other DNA
accactgctgcaggctccag

SEQ ID NO: 1955 - DNA, 23 bp, synthetic construct
  misc_feature 1..23: note = Description of Artificial Sequence: Synthetic expected off-target sequence
  source 1..23: mol_type = other DNA
aatatgttagtcattacctgagg

SEQ ID NO: 1956 - DNA, 23 bp, synthetic construct
  misc_feature 1..23: note = Description of Artificial Sequence: Synthetic expected off-target sequence
  source 1..23: mol_type = other DNA
ataaacgtagtcattacctgggg

SEQ ID NO: 1957 - DNA, 20 bp, synthetic construct
  misc_feature 1..20: note = Description of Artificial Sequence: Synthetic PCR primer
  source 1..20: mol_type = other DNA
cctgacccgtggttcccgac

SEQ ID NO: 1958 - DNA, 20 bp, synthetic construct
  misc_feature 1..20: note = Description of Artificial Sequence: Synthetic PCR primer
  source 1..20: mol_type = other DNA
tggtgcgtggtgtgtgtggt

SEQ ID NO: 1959 - DNA, 23 bp, synthetic construct
  misc_feature 1..23: note = Description of Artificial Sequence: Synthetic expected off-target sequence
  source 1..23: mol_type = other DNA
atcatcatcgtcattatctgggg

SEQ ID NO: 1960 - DNA, 25 bp, synthetic construct
  misc_feature 1..25: note = Description of Artificial Sequence: Synthetic PCR primer
  source 1..25: mol_type = other DNA
tgggaacattggagaagtttcctga

SEQ ID NO: 1961 - DNA, 22 bp, synthetic construct
  misc_feature 1..22: note = Description of Artificial Sequence: Synthetic PCR primer
  source 1..22: mol_type = other DNA
ccatgtgactactgggctgccc

SEQ ID NO: 1962 - DNA, 23 bp, synthetic construct
  misc_feature 1..23: note = Description of Artificial Sequence: Synthetic expected off-target sequence
  source 1..23: mol_type = other DNA
atcattttactcattacttgtgg

SEQ ID NO: 1963 - DNA, 21 bp, synthetic construct
  misc_feature 1..21: note = Description of Artificial Sequence: Synthetic PCR primer
  source 1..21: mol_type = other DNA
agccttggcaagcaactccct

SEQ ID NO: 1964 - DNA, 27 bp, synthetic construct
  misc_feature 1..27: note = Description of Artificial Sequence: Synthetic PCR primer
  source 1..27: mol_type = other DNA
ggttctctctctcagaaaagaaagagg

SEQ ID NO: 1965 - DNA, 23 bp, synthetic construct
  misc_feature 1..23: note = Description of Artificial Sequence: Synthetic expected off-target sequence
  source 1..23: mol_type = other DNA
atcattttagtcatctcctgtgg

SEQ ID NO: 1966 - DNA, 20 bp, synthetic construct
  misc_feature 1..20: note = Description of Artificial Sequence: Synthetic PCR primer
  source 1..20: mol_type = other DNA
ggcagcggacttcagagcca

SEQ ID NO: 1967 - DNA, 21 bp, synthetic construct
  misc_feature 1..21: note = Description of Artificial Sequence: Synthetic PCR primer
  source 1..21: mol_type = other DNA
gccagaggctctcagcagtgc

SEQ ID NO: 1968 - DNA, 23 bp, synthetic construct
  misc_feature 1..23: note = Description of Artificial Sequence: Synthetic expected off-target sequence
  source 1..23: mol_type = other DNA
cacagcttagtcatcacctgggg

SEQ ID NO: 1969 - DNA, 20 bp, synthetic construct
  misc_feature 1..20: note = Description of Artificial Sequence: Synthetic PCR primer
  source 1..20: mol_type = other DNA
ccagcctggtcaatatggca

SEQ ID NO: 1970 - DNA, 20 bp, synthetic construct
  misc_feature 1..20: note = Description of Artificial Sequence: Synthetic PCR primer
  source 1..20: mol_type = other DNA
actgtgcccagccccatatt

SEQ ID NO: 1971 - DNA, 23 bp, synthetic construct
  misc_feature 1..23: note = Description of Artificial Sequence: Synthetic expected off-target sequence
  source 1..23: mol_type = other DNA
cccagcttagtcattagctgtgg

SEQ ID NO: 1972 - DNA, 20 bp, synthetic construct
  misc_feature 1..20: note = Description of Artificial Sequence: Synthetic PCR primer
  source 1..20: mol_type = other DNA
atgccaacactcgaggggcc

SEQ ID NO: 1973 - DNA, 20 bp, synthetic construct
  misc_feature 1..20: note = Description of Artificial Sequence: Synthetic PCR primer
  source 1..20: mol_type = other DNA
cgggttgtggcaccgggtta

SEQ ID NO: 1974 - DNA, 23 bp, synthetic construct
  misc_feature 1..23: note = Description of Artificial Sequence: Synthetic expected off-target sequence
  source 1..23: mol_type = other DNA
ctcacctttgtcatttcctgagg

SEQ ID NO: 1975 - DNA, 20 bp, synthetic construct
  misc_feature 1..20: note = Description of Artificial Sequence: Synthetic PCR primer
  source 1..20: mol_type = other DNA
ttgctctagtggggaggggg

SEQ ID NO: 1976 - DNA, 27 bp, synthetic construct
  misc_feature 1..27: note = Description of Artificial Sequence: Synthetic PCR primer
  source 1..27: mol_type = other DNA
agagttcaggcatgaaaagaagcaaca

SEQ ID NO: 1977 - DNA, 23 bp, synthetic construct
  misc_feature 1..23: note = Description of Artificial Sequence: Synthetic expected off-target sequence
  source 1..23: mol_type = other DNA
ctcattttattcattgcctgggg

SEQ ID NO: 1978 - DNA, 26 bp, synthetic construct
  misc_feature 1..26: note = Description of Artificial Sequence: Synthetic PCR primer
  source 1..26: mol_type = other DNA
agctgaagatagcagtgtttaagcct

SEQ ID NO: 1979 - DNA, 23 bp, synthetic construct
  misc_feature 1..23: note = Description of Artificial Sequence: Synthetic PCR primer
  source 1..23: mol_type = other DNA
tgcaatttgaggggctctcttca

SEQ ID NO: 1980 - DNA, 23 bp, synthetic construct
  misc_feature 1..23: note = Description of Artificial Sequence: Synthetic expected off-target sequence
  source 1..23: mol_type = other DNA
ctctccttagtcactacctgagg

SEQ ID NO: 1981 - DNA, 22 bp, synthetic construct
  misc_feature 1..22: note = Description of Artificial Sequence: Synthetic PCR primer
  source 1..22: mol_type = other DNA
agtcactggagtaagcctgcct

SEQ ID NO: 1982 - DNA, 25 bp, synthetic construct
  misc_feature 1..25: note = Description of Artificial Sequence: Synthetic PCR primer
  source 1..25: mol_type = other DNA
tgccagccaaaagttgttagtgtgt

SEQ ID NO: 1983 - DNA, 23 bp, synthetic construct
  misc_feature 1..23: note = Description of Artificial Sequence: Synthetic expected off-target sequence
  source 1..23: mol_type = other DNA
cttatctctgtcattacctgggg

SEQ ID NO: 1984 - DNA, 20 bp, synthetic construct
  misc_feature 1..20: note = Description of Artificial Sequence: Synthetic PCR primer
  source 1..20: mol_type = other DNA
gggtctccctcagtgccctg

SEQ ID NO: 1985 - DNA, 24 bp, synthetic construct
  misc_feature 1..24: note = Description of Artificial Sequence: Synthetic PCR primer
  source 1..24: mol_type = other DNA
tgtgtggtagggagcaaaacgaca

SEQ ID NO: 1986 - DNA, 23 bp, synthetic construct
  misc_feature 1..23: note = Description of Artificial Sequence: Synthetic expected off-target sequence
  source 1..23: mol_type = other DNA
gacagctccgtcattacctgggg

SEQ ID NO: 1987 - DNA, 21 bp, synthetic construct
  misc_feature 1..21: note = Description of Artificial Sequence: Synthetic PCR primer
  source 1..21: mol_type = other DNA
tgggggctgttaagaggcaca

SEQ ID NO: 1988 - DNA, 20 bp, synthetic construct
  misc_feature 1..20: note = Description of Artificial Sequence: Synthetic PCR primer
  source 1..20: mol_type = other DNA
tgaccacacacacccccacg

SEQ ID NO: 1989 - DNA, 23 bp, synthetic construct
  misc_feature 1..23: note = Description of Artificial Sequence: Synthetic expected off-target sequence
  source 1..23: mol_type = other DNA
gccacctcagtcattagctgggg

SEQ ID NO: 1990 - DNA, 26 bp, synthetic construct
  misc_feature 1..26: note = Description of Artificial Sequence: Synthetic PCR primer
  source 1..26: mol_type = other DNA
tcaaaacagattgaccaaggccaaat

SEQ ID NO: 1991 - DNA, 24 bp, synthetic construct
  misc_feature 1..24: note = Description of Artificial Sequence: Synthetic PCR primer
  source 1..24: mol_type = other DNA
tgtgtttttaagctgcaccccagg

SEQ ID NO: 1992 - DNA, 23 bp, synthetic construct
  misc_feature 1..23: note = Description of Artificial Sequence: Synthetic expected off-target sequence
  source 1..23: mol_type = other DNA
ggaatcttactcattacttgggg

SEQ ID NO: 1993 - DNA, 24 bp, synthetic construct
  misc_feature 1..24: note = Description of Artificial Sequence: Synthetic PCR primer
  source 1..24: mol_type = other DNA
tctggcaccaggactgattgtaca

SEQ ID NO: 1994 - DNA, 20 bp, synthetic construct
  misc_feature 1..20: note = Description of Artificial Sequence: Synthetic PCR primer
  source 1..20: mol_type = other DNA
gcacgcagctgactcccaga

SEQ ID NO: 1995 - DNA, 23 bp, synthetic construct
  misc_feature 1..23: note = Description of Artificial Sequence: Synthetic expected off-target sequence
  source 1..23: mol_type = other DNA
gtggcctcagtcattacctgcgg

SEQ ID NO: 1996 - DNA, 23 bp, synthetic construct
  misc_feature 1..23: note = Description of Artificial Sequence: Synthetic expected off-target sequence
  source 1..23: mol_type = other DNA
gttgttttagtgattacctgagg

SEQ ID NO: 1997 - DNA, 25 bp, synthetic construct
  misc_feature 1..25: note = Description of Artificial Sequence: Synthetic PCR primer
  source 1..25: mol_type = other DNA
agcatctgtgataccctacctgtct

SEQ ID NO: 1998 - DNA, 20 bp, synthetic construct
  misc_feature 1..20: note = Description of Artificial Sequence: Synthetic PCR primer
  source 1..20: mol_type = other DNA
accagggctgccacagagtc

SEQ ID NO: 1999 - DNA, 23 bp, synthetic construct
  misc_feature 1..23: note = Description of Artificial Sequence: Synthetic expected off-target sequence
  source 1..23: mol_type = other DNA
tacatcttagtcctcacctgtgg

SEQ ID NO: 2000 - DNA, 20 bp, synthetic construct
  misc_feature 1..20: note = Description of Artificial Sequence: Synthetic PCR primer
  source 1..20: mol_type = other DNA
tagtcttgttgcccaggctg

SEQ ID NO: 2001 - DNA, 20 bp, synthetic construct
  misc_feature 1..20: note = Description of Artificial Sequence: Synthetic PCR primer
  source 1..20: mol_type = other DNA
ctcggcccctgagagttcat

SEQ ID NO: 2002 - DNA, 23 bp, synthetic construct
  misc_feature 1..23: note = Description of Artificial Sequence: Synthetic expected off-target sequence
  source 1..23: mol_type = other DNA
tccatctcactcattacctgagg

SEQ ID NO: 2003 - DNA, 20 bp, synthetic construct
  misc_feature 1..20: note = Description of Artificial Sequence: Synthetic PCR primer
  source 1..20: mol_type = other DNA
ctgcaaccagggcccttacc

SEQ ID NO: 2004 - DNA, 20 bp, synthetic construct
  misc_feature 1..20: note = Description of Artificial Sequence: Synthetic PCR primer
  source 1..20: mol_type = other DNA
gagcagcagcaaagccaccg

SEQ ID NO: 2005 - DNA, 23 bp, synthetic construct
  misc_feature 1..23: note = Description of Artificial Sequence: Synthetic expected off-target sequence
  source 1..23: mol_type = other DNA
ttcatcctagtcaacacctgggg

SEQ ID NO: 2006 - DNA, 20 bp, synthetic construct
  misc_feature 1..20: note = Description of Artificial Sequence: Synthetic PCR primer
  source 1..20: mol_type = other DNA
gcctggagagcaagcctggg

SEQ ID NO: 2007 - DNA, 20 bp, synthetic construct
  misc_feature 1..20: note = Description of Artificial Sequence: Synthetic PCR primer
  source 1..20: mol_type = other DNA
agccgagacaatctgccccg

SEQ ID NO: 2008 - DNA, 23 bp, synthetic construct
  misc_feature 1..23: note = Description of Artificial Sequence: Synthetic expected off-target sequence
  source 1..23: mol_type = other DNA
tttatattagtgattacctgtgg

SEQ ID NO: 2009 - DNA, 26 bp, synthetic construct
  misc_feature 1..26: note = Description of Artificial Sequence: Synthetic PCR primer
  source 1..26: mol_type = other DNA
agtgaaacaaacaagcagcagtctga

SEQ ID NO: 2010 - DNA, 20 bp, synthetic construct
  misc_feature 1..20: note = Description of Artificial Sequence: Synthetic PCR primer
  source 1..20: mol_type = other DNA
ggcaggtctgaccagtgggg

SEQ ID NO: 2011 - DNA, 23 bp, synthetic construct
  misc_feature 1..23: note = Description of Artificial Sequence: Synthetic expected off-target sequence
  source 1..23: mol_type = other DNA
aacgtgtaagtcattacctgagg

SEQ ID NO: 2012 - DNA, 24 bp, synthetic construct
  misc_feature 1..24: note = Description of Artificial Sequence: Synthetic PCR primer
  source 1..24: mol_type = other DNA
aggctcagagaggtaagcaatgga

SEQ ID NO: 2013 - DNA, 27 bp, synthetic construct
  misc_feature 1..27: note = Description of Artificial Sequence: Synthetic PCR primer
  source 1..27: mol_type = other DNA
tgagtagacagaaatgttaccggtgtt

SEQ ID NO: 2014 - DNA, 23 bp, synthetic construct
  misc_feature 1..23: note = Description of Artificial Sequence: Synthetic expected off-target sequence
  source 1..23: mol_type = other DNA
aagatcacagtcattacctgggg

SEQ ID NO: 2015 - DNA, 25 bp, synthetic construct
  misc_feature 1..25: note = Description of Artificial Sequence: Synthetic PCR primer
  source 1..25: mol_type = other DNA
tcagagatgttaaagccttggtggg

SEQ ID NO: 2016 - DNA, 22 bp, synthetic construct
  misc_feature 1..22: note = Description of Artificial Sequence: Synthetic PCR primer
  source 1..22: mol_type = other DNA
agtgaaccaagggaatggggga

SEQ ID NO: 2017 - DNA, 23 bp, synthetic construct
  misc_feature 1..23: note = Description of Artificial Sequence: Synthetic expected off-target sequence
  source 1..23: mol_type = other DNA
agaatattagtccttacctgggg

SEQ ID NO: 2018 - DNA, 22 bp, synthetic construct
  misc_feature 1..22: note = Description of Artificial Sequence: Synthetic PCR primer
  source 1..22: mol_type = other DNA
tgtgctttctggggtagtggca

SEQ ID NO: 2019 - DNA, 22 bp, synthetic construct
  misc_feature 1..22: note = Description of Artificial Sequence: Synthetic PCR primer
  source 1..22: mol_type = other DNA
cacctcagccctgtagtcctgg

SEQ ID NO: 2020 - DNA, 23 bp, synthetic construct
  misc_feature 1..23: note = Description of Artificial Sequence: Synthetic expected off-target sequence
  source 1..23: mol_type = other DNA
agcagattagtgattacctgggg

SEQ ID NO: 2021 - DNA, 22 bp, synthetic construct
  misc_feature 1..22: note = Description of Artificial Sequence: Synthetic PCR primer
  source 1..22: mol_type = other DNA
ccattgggtgactgaatgcaca

SEQ ID NO: 2022 - DNA, 20 bp, synthetic construct
  misc_feature 1..20: note = Description of Artificial Sequence: Synthetic PCR primer
  source 1..20: mol_type = other DNA
gccactgtccccagcctatt

SEQ ID NO: 2023 - DNA, 23 bp, synthetic construct
  misc_feature 1..23: note = Description of Artificial Sequence: Synthetic expected off-target sequence
  source 1..23: mol_type = other DNA
agtagcttagtgattacctgggg

SEQ ID NO: 2024 - DNA, 24 bp, synthetic construct
  misc_feature 1..24: note = Description of Artificial Sequence: Synthetic PCR primer
  source 1..24: mol_type = other DNA
accaagaaagtgaaaaggaaaccc

SEQ ID NO: 2025 - DNA, 23 bp, synthetic construct
  misc_feature 1..23: note = Description of Artificial Sequence: Synthetic PCR primer
  source 1..23: mol_type = other DNA
tgagatggcatacgatttaccca

SEQ ID NO: 2026 - DNA, 23 bp, synthetic construct
  misc_feature 1..23: note = Description of Artificial Sequence: Synthetic expected off-target sequence
  source 1..23: mol_type = other DNA
cacggcttactcattacctgggg

SEQ ID NO: 2027 - DNA, 22 bp, synthetic construct
  misc_feature 1..22: note = Description of Artificial Sequence: Synthetic PCR primer
  source 1..22: mol_type = other DNA
agggtggggactgaaaggagct

SEQ ID NO: 2028 - DNA, 26 bp, synthetic construct
  misc_feature 1..26: note = Description of Artificial Sequence: Synthetic PCR primer
  source 1..26: mol_type = other DNA
tggcatcactcagagattggaacaca

SEQ ID NO: 2029 - DNA, 23 bp, synthetic construct
  misc_feature 1..23: note = Description of Artificial Sequence: Synthetic expected off-target sequence
  source 1..23: mol_type = other DNA
catatgttaggcattacctgggg

SEQ ID NO: 2030 - DNA, 22 bp, synthetic construct
  misc_feature 1..22: note = Description of Artificial Sequence: Synthetic PCR primer
  source 1..22: mol_type = other DNA
accagtgctgtgtgaccttgga

SEQ ID NO: 2031 - DNA, 22 bp, synthetic construct
  misc_feature 1..22: note = Description of Artificial Sequence: Synthetic PCR primer
  source 1..22: mol_type = other DNA
tcctatgggaggggaggcttct

SEQ ID NO: 2032 - DNA, 23 bp, synthetic construct
  misc_feature 1..23: note = Description of Artificial Sequence: Synthetic expected off-target sequence
  source 1..23: mol_type = other DNA
catttcttagtcatttcctgagg

SEQ ID NO: 2033 - DNA, 21 bp, synthetic construct
  misc_feature 1..21: note = Description of Artificial Sequence: Synthetic PCR primer
  source 1..21: mol_type = other DNA
ccaggtgtggtggttcatgac

SEQ ID NO: 2034 - DNA, 22 bp, synthetic construct
  misc_feature 1..22: note = Description of Artificial Sequence: Synthetic PCR primer
  source 1..22: mol_type = other DNA
gcatacggcagtagaatgagcc

SEQ ID NO: 2035 - DNA, 23 bp, synthetic construct
  misc_feature 1..23: note = Description of Artificial Sequence: Synthetic expected off-target sequence
  source 1..23: mol_type = other DNA
tgcagctaactcattacctgcgg

SEQ ID NO: 2036 - DNA, 21 bp, synthetic construct
  misc_feature 1..21: note = Description of Artificial Sequence: Synthetic PCR primer
  source 1..21: mol_type = other DNA
caggcgctgggttcttagcct

SEQ ID NO: 2037 - DNA, 20 bp, synthetic construct
  misc_feature 1..20: note = Description of Artificial Sequence: Synthetic PCR primer
  source 1..20: mol_type = other DNA
ccttcctgggccccatggtg

SEQ ID NO: 2038 - DNA, 23 bp, synthetic construct
  misc_feature 1..23: note = Description of Artificial Sequence: Synthetic expected off-target sequence
  source 1..23: mol_type = other DNA
ttgcttttagttattacctgggg

SEQ ID NO: 2039 - DNA, 20 bp, synthetic construct
  misc_feature 1..20: note = Description of Artificial Sequence: Synthetic PCR primer
  source 1..20: mol_type = other DNA
tggggtccaagatgtcccct

SEQ ID NO: 2040 - DNA, 24 bp, synthetic construct
  misc_feature 1..24: note = Description of Artificial Sequence: Synthetic PCR primer
  source 1..24: mol_type = other DNA
tgaaactgcttgatgaggtgtgga

SEQ ID NO: 2041 - DNA, 23 bp, synthetic construct
  misc_feature 1..23: note = Description of Artificial Sequence: Synthetic expected off-target sequence
  source 1..23: mol_type = other DNA
aacttgaaagtcattacctgtgg

SEQ ID NO: 2042 - DNA, 21 bp, synthetic construct
  misc_feature 1..21: note = Description of Artificial Sequence: Synthetic PCR primer
  source 1..21: mol_type = other DNA
gctgggcttggtggtatatgc

SEQ ID NO: 2043 - DNA, 25 bp, synthetic construct
  misc_feature 1..25: note = Description of Artificial Sequence: Synthetic PCR primer
  source 1..25: mol_type = other DNA
acttgcaaagctgataactgactga

SEQ ID NO: 2044 - DNA, 23 bp, synthetic construct
  misc_feature 1..23: note = Description of Artificial Sequence: Synthetic expected off-target sequence
  source 1..23: mol_type = other DNA
aaggtcacagtcattacctgggg

SEQ ID NO: 2045 - DNA, 23 bp, synthetic construct
  misc_feature 1..23: note = Description of Artificial Sequence: Synthetic PCR primer
  source 1..23: mol_type = other DNA
agttggtgtcactgacaatggga

SEQ ID NO: 2046 - DNA, 20 bp, synthetic construct
  misc_feature 1..20: note = Description of Artificial Sequence: Synthetic PCR primer
  source 1..20: mol_type = other DNA
cgcagcgcacgagttcatca

SEQ ID NO: 2047 - DNA, 23 bp, synthetic construct
  misc_feature 1..23: note = Description of Artificial Sequence: Synthetic expected off-target sequence
  source 1..23: mol_type = other DNA
aatgtcttcatcattacctgagg

SEQ ID NO: 2048 - DNA, 23 bp, synthetic construct
  misc_feature 1..23: note = Description of Artificial Sequence: Synthetic PCR primer
  source 1..23: mol_type = other DNA
agaggaggcacaattcaacccct

SEQ ID NO: 2049 - DNA, 20 bp, synthetic construct
  misc_feature 1..20: note = Description of Artificial Sequence: Synthetic PCR primer
  source 1..20: mol_type = other DNA
ggctggggaggcctcacaat

SEQ ID NO: 2050 - DNA, 23 bp, synthetic construct
  misc_feature 1..23: note = Description of Artificial Sequence: Synthetic expected off-target sequence
  source 1..23: mol_type = other DNA
agatgcttggtcattacctgtgg

SEQ ID NO: 2051 - DNA, 23 bp, synthetic construct
  misc_feature 1..23: note = Description of Artificial Sequence: Synthetic PCR primer
  source 1..23: mol_type = other DNA
gggaaagtttgggaaagtcagca

SEQ ID NO: 2052 - DNA, 20 bp, synthetic construct
  misc_feature 1..20: note = Description of Artificial Sequence: Synthetic PCR primer
  source 1..20: mol_type = other DNA
aggacaagctaccccacacc

SEQ ID NO: 2053 - DNA, 23 bp, synthetic construct
  misc_feature 1..23: note = Description of Artificial Sequence: Synthetic expected off-target sequence
  source 1..23: mol_type = other DNA
agtagattagttattacctgggg

SEQ ID NO: 2054 - DNA, 23 bp, synthetic construct
  misc_feature 1..23: note = Description of Artificial Sequence: Synthetic PCR primer
  source 1..23: mol_type = other DNA
tggtgcatcaaagggttgcttct

SEQ ID NO: 2055 - DNA, 20 bp, synthetic construct
  misc_feature 1..20: note = Description of Artificial Sequence: Synthetic PCR primer
  source 1..20: mol_type = other DNA
tcattccagcacgccgggag

SEQ ID NO: 2056 - DNA, 23 bp, synthetic construct
  misc_feature 1..23: note = Description of Artificial Sequence: Synthetic expected off-target sequence
  source 1..23: mol_type = other DNA
agtaggttagtaattacctgggg

SEQ ID NO: 2057 - DNA, 20 bp, synthetic construct
  misc_feature 1..20: note = Description of Artificial Sequence: Synthetic PCR primer
  source 1..20: mol_type = other DNA
cccaggctgcccatcacact

SEQ ID NO: 2058 - DNA, 25 bp, synthetic construct
  misc_feature 1..25: note = Description of Artificial Sequence: Synthetic PCR primer
  source 1..25: mol_type = other DNA
tggagtaagtataccttggggacct

SEQ ID NO: 2059 - DNA, 23 bp, synthetic construct
  misc_feature 1..23: note = Description of Artificial Sequence: Synthetic expected off-target sequence
  source 1..23: mol_type = other DNA
caaatgagagtcattacctgagg

SEQ ID NO: 2060 - DNA, 20 bp, synthetic construct
  misc_feature 1..20: note = Description of Artificial Sequence: Synthetic PCR primer
  source 1..20: mol_type = other DNA
tcagtgcccctgggtcctca

SEQ ID NO: 2061 - DNA, 23 bp, synthetic construct
  misc_feature 1..23: note = Description of Artificial Sequence: Synthetic PCR primer
  source 1..23: mol_type = other DNA
tgtgcaaatacctagcacggtgc

SEQ ID NO: 2062 - DNA, 23 bp, synthetic construct
  misc_feature 1..23: note = Description of Artificial Sequence: Synthetic expected off-target sequence
  source 1..23: mol_type = other DNA
catgtctgaatcattacctgagg

SEQ ID NO: 2063 - DNA, 26 bp, synthetic construct
  misc_feature 1..26: note = Description of Artificial Sequence: Synthetic PCR primer
  source 1..26: mol_type = other DNA
agcactcccttttgaattttggtgct

SEQ ID NO: 2064 - DNA, 26 bp, synthetic construct
  misc_feature 1..26: note = Description of Artificial Sequence: Synthetic PCR primer
  source 1..26: mol_type = other DNA
actgaagtccagcctcttccatttca

SEQ ID NO: 2065 - DNA, 23 bp, synthetic construct
  misc_feature 1..23: note = Description of Artificial Sequence: Synthetic expected off-target sequence
  source 1..23: mol_type = other DNA
cctgacttggtcattacctgtgg

SEQ ID NO: 2066 - DNA, 20 bp, synthetic construct
  misc_feature 1..20: note = Description of Artificial Sequence: Synthetic PCR primer
  source 1..20: mol_type = other DNA
gaaaccggtccctggtgcca

SEQ ID NO: 2067 - DNA, 23 bp, synthetic construct
  misc_feature 1..23: note = Description of Artificial Sequence: Synthetic PCR primer
  source 1..23: mol_type = other DNA
ggggagtagagggtagtgttgcc

SEQ ID NO: 2068 - DNA, 23 bp, synthetic construct
  misc_feature 1..23: note = Description of Artificial Sequence: Synthetic expected off-target sequence
  source 1..23: mol_type = other DNA
cgtgcattagtcattacctgagg

SEQ ID NO: 2069 - DNA, 20 bp, synthetic construct
  misc_feature 1..20: note = Description of Artificial Sequence: Synthetic PCR primer
  source 1..20: mol_type = other DNA
ttgcgggtccctgtggagtc

SEQ ID NO: 2070 - DNA, 20 bp, synthetic construct
  misc_feature 1..20: note = Description of Artificial Sequence: Synthetic PCR primer
  source 1..20: mol_type = other DNA
aggtgccgtgttgtgcccaa

SEQ ID NO: 2071 - DNA, 23 bp, synthetic construct
  misc_feature 1..23: note = Description of Artificial Sequence: Synthetic expected off-target sequence
  source 1..23: mol_type = other DNA
ggaatcccttctgcagcacctgg

SEQ ID NO: 2072 - DNA, 23 bp, synthetic construct
  misc_feature 1..23: note = Description of Artificial Sequence: Synthetic PCR primer
  source 1..23: mol_type = other DNA
gccctacatctgctctccctcca

SEQ ID NO: 2073 - DNA, 20 bp, synthetic construct
  misc_feature 1..20: note = Description of Artificial Sequence: Synthetic PCR primer
  source 1..20: mol_type = other DNA
gggccgggaaagagttgctg

SEQ ID NO: 2074 - DNA, 23 bp, synthetic construct
  misc_feature 1..23: note = Description of Artificial Sequence: Synthetic expected off-target sequence
  source 1..23: mol_type = other DNA
ggaaccccgtctgcagcaccagg

SEQ ID NO: 2075 - DNA, 20 bp, synthetic construct
  misc_feature 1..20: note = Description of Artificial Sequence: Synthetic PCR primer
  source 1..20: mol_type = other DNA
ttggagtgtggcccgggttg

SEQ ID NO: 2076 - DNA, 24 bp, synthetic construct
  misc_feature 1..24: note = Description of Artificial Sequence: Synthetic PCR primer
  source 1..24: mol_type = other DNA
acctctctttctctgcctcactgt

SEQ ID NO: 2077 - DNA, 23 bp, synthetic construct
  misc_feature 1..23: note = Description of Artificial Sequence: Synthetic expected off-target sequence
  source 1..23: mol_type = other DNA
ggaacaccttctgcagctccagg

SEQ ID NO: 2078 - DNA, 20 bp, synthetic construct
  misc_feature 1..20: note = Description of Artificial Sequence: Synthetic PCR primer
  source 1..20: mol_type = other DNA
cacaccatgctgatccaggc

SEQ ID NO: 2079 - DNA, 20 bp, synthetic construct
  misc_feature 1..20: note = Description of Artificial Sequence: Synthetic PCR primer
  source 1..20: mol_type = other DNA
gcagtacggaagcacgaagc

SEQ ID NO: 2080 - DNA, 23 bp, synthetic construct
  misc_feature 1..23: note = Description of Artificial Sequence: Synthetic expected off-target sequence
  source 1..23: mol_type = other DNA
ggaagctctgctgcagcacctgg

SEQ ID NO: 2081 - DNA, 20 bp, synthetic construct
  misc_feature 1..20: note = Description of Artificial Sequence: Synthetic PCR primer
  source 1..20: mol_type = other DNA
ctccagggctcgctgtccac

SEQ ID NO: 2082 - DNA, 20 bp, synthetic construct
  misc_feature 1..20: note = Description of Artificial Sequence: Synthetic PCR primer
  source 1..20: mol_type = other DNA
ctgggctctgctggttcccc

SEQ ID NO: 2083 - DNA, 23 bp, synthetic construct
  misc_feature 1..23: note = Description of Artificial Sequence: Synthetic expected off-target sequence
  source 1..23: mol_type = other DNA
ggaatatcttctgcagccccagg

SEQ ID NO: 2084 - DNA, 20 bp, synthetic construct
  misc_feature 1..20: note = Description of Artificial Sequence: Synthetic PCR primer
  source 1..20: mol_type = other DNA
ctgtggtagccgtggccagg

SEQ ID NO: 2085 - DNA, 21 bp, synthetic construct
  misc_feature 1..21: note = Description of Artificial Sequence: Synthetic PCR primer
  source 1..21: mol_type = other DNA
ccccataccacctctccggga

SEQ ID NO: 2086 - DNA, 23 bp, synthetic construct
  misc_feature 1..23: note = Description of Artificial Sequence: Synthetic expected off-target sequence
  source 1..23: mol_type = other DNA
ggaatcacttttacagcaccagg

SEQ ID NO: 2087 - DNA, 20 bp, synthetic construct
  misc_feature 1..20: note = Description of Artificial Sequence: Synthetic PCR primer
  source 1..20: mol_type = other DNA
ggtggcgggacttgaatgag

SEQ ID NO: 2088 - DNA, 20 bp, synthetic construct
  misc_feature 1..20: note = Description of Artificial Sequence: Synthetic PCR primer
  source 1..20: mol_type = other DNA
ccagcgtgtttccaagggat

SEQ ID NO: 2089 - DNA, 23 bp, synthetic construct
  misc_feature 1..23: note = Description of Artificial Sequence: Synthetic expected off-target sequence
  source 1..23: mol_type = other DNA
ggaatcccctctccagcccctgg

SEQ ID NO: 2090 - DNA, 20 bp, synthetic construct
  misc_feature 1..20: note = Description of Artificial Sequence: Synthetic PCR primer
  source 1..20: mol_type = other DNA
ccagaggtggggccctgtga

SEQ ID NO: 2091 - DNA, 23 bp, synthetic construct
  misc_feature 1..23: note = Description of Artificial Sequence: Synthetic PCR primer
  source 1..23: mol_type = other DNA
tttccacactcagttctgcagga

SEQ ID NO: 2092 - DNA, 23 bp, synthetic construct
  misc_feature 1..23: note = Description of Artificial Sequence: Synthetic expected off-target sequence
  source 1..23: mol_type = other DNA
ggaatctcttcttcagcatctgg

SEQ ID NO: 2093 - DNA, 24 bp, synthetic construct
  misc_feature 1..24: note = Description of Artificial Sequence: Synthetic PCR primer
  source 1..24: mol_type = other DNA
tgtgactggttgtcctgctttcct

SEQ ID NO: 2094 - DNA, 23 bp, synthetic construct
  misc_feature 1..23: note = Description of Artificial Sequence: Synthetic PCR primer
  source 1..23: mol_type = other DNA
gcagtgttttgtggtgatgggca

SEQ ID NO: 2095 - DNA, 23 bp, synthetic construct
  misc_feature 1..23: note = Description of Artificial Sequence: Synthetic expected off-target sequence
  source 1..23: mol_type = other DNA
ggaattgcttctgcagcgccagg

SEQ ID NO: 2096 - DNA, 20 bp, synthetic construct
  misc_feature 1..20: note = Description of Artificial Sequence: Synthetic PCR primer
  source 1..20: mol_type = other DNA
ctggccaaggggtgagtggg

SEQ ID NO: 2097 - DNA, 20 bp, synthetic construct
  misc_feature 1..20: note = Description of Artificial Sequence: Synthetic PCR primer
  source 1..20: mol_type = other DNA
tgggaccccagcagccaatg

SEQ ID NO: 2098 - DNA, 23 bp, synthetic construct
  misc_feature 1..23: note = Description of Artificial Sequence: Synthetic expected off-target sequence
  source 1..23: mol_type = other DNA
ggactcccctctgcagcagctgg

SEQ ID NO: 2099 - DNA, 20 bp, synthetic construct
  misc_feature 1..20: note = Description of Artificial Sequence: Synthetic PCR primer
  source 1..20: mol_type = other DNA
acggtgtgctggctgctctt

SEQ ID NO: 2100 - DNA, 20 bp, synthetic construct
  misc_feature 1..20: note = Description of Artificial Sequence: Synthetic PCR primer
  source 1..20: mol_type = other DNA
acagtgctgaccgtgctggg

SEQ ID NO: 2101 - DNA, 23 bp, synthetic construct
  misc_feature 1..23: note = Description of Artificial Sequence: Synthetic expected off-target sequence
  source 1..23: mol_type = other DNA
ggagtccctcctacagcaccagg

SEQ ID NO: 2102 - DNA, 21 bp, synthetic construct
  misc_feature 1..21: note = Description of Artificial Sequence: Synthetic PCR primer
  source 1..21: mol_type = other DNA
tggtttgggcctcagggatgg

SEQ ID NO: 2103 - DNA, 24 bp, synthetic construct
  misc_feature 1..24: note = Description of Artificial Sequence: Synthetic PCR primer
  source 1..24: mol_type = other DNA
tgcctcccacaaaaatgtctacct

SEQ ID NO: 2104 - DNA, 23 bp, synthetic construct
  misc_feature 1..23: note = Description of Artificial Sequence: Synthetic expected off-target sequence
  source 1..23: mol_type = other DNA
ggagtccctcctacagcaccagg

SEQ ID NO: 2105 - DNA, 21 bp, synthetic construct
  misc_feature 1..21: note = Description of Artificial Sequence: Synthetic PCR primer
  source 1..21: mol_type = other DNA
tggtttgggcctcagggatgg

SEQ ID NO: 2106 - DNA, 23 bp, synthetic construct
  misc_feature 1..23: note = Description of Artificial Sequence: Synthetic PCR primer
  source 1..23: mol_type = other DNA
accccttatcccagaacccatga

SEQ ID NO: 2107 - DNA, 23 bp, synthetic construct
  misc_feature 1..23: note = Description of Artificial Sequence: Synthetic expected off-target sequence
  source 1..23: mol_type = other DNA
ggcatccattctgcagcccctgg

SEQ ID NO: 2108 - DNA, 21 bp, synthetic construct
  misc_feature 1..21: note = Description of Artificial Sequence: Synthetic PCR primer
  source 1..21: mol_type = other DNA
tccaagtcagcgatgagggct

SEQ ID NO: 2109 - DNA, 23 bp, synthetic construct
  misc_feature 1..23: note = Description of Artificial Sequence: Synthetic PCR primer
  source 1..23: mol_type = other DNA
tgggagctgttcctttttggcca

SEQ ID NO: 2110 - DNA, 23 bp, synthetic construct
  misc_feature 1..23: note = Description of Artificial Sequence: Synthetic expected off-target sequence
  source 1..23: mol_type = other DNA
ggcttcccttctgcagccccagg

SEQ ID NO: 2111 - DNA, 20 bp, synthetic construct
  misc_feature 1..20: note = Description of Artificial Sequence: Synthetic PCR primer
  source 1..20: mol_type = other DNA
cacccctctcagcttcccaa

SEQ ID NO: 2112 - DNA, 20 bp, synthetic construct
  misc_feature 1..20: note = Description of Artificial Sequence: Synthetic PCR primer
  source 1..20: mol_type = other DNA
gctagagggtctgctgcctt

SEQ ID NO: 2113 - DNA, 23 bp, synthetic construct
  misc_feature 1..23: note = Description of Artificial Sequence: Synthetic expected off-target sequence
  source 1..23: mol_type = other DNA
tgaatcccatctccagcaccagg

SEQ ID NO: 2114 - DNA, 20 bp, synthetic construct
  misc_feature 1..20: note = Description of Artificial Sequence: Synthetic PCR primer
  source 1..20: mol_type = other DNA
agaccccttggccaagcaca

SEQ ID NO: 2115 - DNA, 20 bp, synthetic construct
  misc_feature 1..20: note = Description of Artificial Sequence: Synthetic PCR primer
  source 1..20: mol_type = other DNA
cttgctctcaccccgcctcc

SEQ ID NO: 2116 - DNA, 23 bp, synthetic construct
  misc_feature 1..23: note = Description of Artificial Sequence: Synthetic expected off-target sequence
  source 1..23: mol_type = other DNA
aaaataccttctgcagtaccagg

SEQ ID NO: 2117 - DNA, 20 bp, synthetic construct
  misc_feature 1..20: note = Description of Artificial Sequence: Synthetic PCR primer
  source 1..20: mol_type = other DNA
acatgtgggaggcggacaga

SEQ ID NO: 2118 - DNA, 25 bp, synthetic construct
  misc_feature 1..25: note = Description of Artificial Sequence: Synthetic PCR primer
  source 1..25: mol_type = other DNA
tctcactttgctgttaccgatgtcg

SEQ ID NO: 2119 - DNA, 23 bp, synthetic construct
  misc_feature 1..23: note = Description of Artificial Sequence: Synthetic expected off-target sequence
  source 1..23: mol_type = other DNA
aaaatcccttcttcaacacctgg

SEQ ID NO: 2120 - DNA, 20 bp, synthetic construct
  misc_feature 1..20: note = Description of Artificial Sequence: Synthetic PCR primer
  source 1..20: mol_type = other DNA
ggacgactgtgcctgggaca

SEQ ID NO: 2121 - DNA, 24 bp, synthetic construct
  misc_feature 1..24: note = Description of Artificial Sequence: Synthetic PCR primer
  source 1..24: mol_type = other DNA
agtgcccagagtgttgtaactgct

SEQ ID NO: 2122 - DNA, 23 bp, synthetic construct
  misc_feature 1..23: note = Description of Artificial Sequence: Synthetic expected off-target sequence
  source 1..23: mol_type = other DNA
acactccctcctgcagcacctgg

SEQ ID NO: 2123 - DNA, 20 bp, synthetic construct
  misc_feature 1..20: note = Description of Artificial Sequence: Synthetic PCR primer
  source 1..20: mol_type = other DNA
ggagagctcagcgccaggtc

SEQ ID NO: 2124 - DNA, 20 bp, synthetic construct
  misc_feature 1..20: note = Description of Artificial Sequence: Synthetic PCR primer
  source 1..20: mol_type = other DNA
cagcgtggcccgtgggaata

SEQ ID NO: 2125 - DNA, 23 bp, synthetic construct
  misc_feature 1..23: note = Description of Artificial Sequence: Synthetic expected off-target sequence
  source 1..23: mol_type = other DNA
accatccctcctgcagcaccagg

SEQ ID NO: 2126 - DNA, 21 bp, synthetic construct
  misc_feature 1..21: note = Description of Artificial Sequence: Synthetic PCR primer
  source 1..21: mol_type = other DNA
gctgaagtgctctggggtgct

SEQ ID NO: 2127 - DNA, 25 bp, synthetic construct
  misc_feature 1..25: note = Description of Artificial Sequence: Synthetic PCR primer
  source 1..25: mol_type = other DNA
accccactgtggatgaattggtacc

SEQ ID NO: 2128 - DNA, 23 bp, synthetic construct
  misc_feature 1..23: note = Description of Artificial Sequence: Synthetic expected off-target sequence
  source 1..23: mol_type = other DNA
agaggcccctctgcagcaccagg

SEQ ID NO: 2129 - DNA, 20 bp, synthetic construct
  misc_feature 1..20: note = Description of Artificial Sequence: Synthetic PCR primer
  source 1..20: mol_type = other DNA
tcggggtgcacatggccatc

SEQ ID NO: 2130 - DNA, 20 bp, synthetic construct
  misc_feature 1..20: note = Description of Artificial Sequence: Synthetic PCR primer
  source 1..20: mol_type = other DNA
ttgcctcgcaggggaagcag

SEQ ID NO: 2131 - DNA, 23 bp, synthetic construct
  misc_feature 1..23: note = Description of Artificial Sequence: Synthetic expected off-target sequence
  source 1..23: mol_type = other DNA
aggatcccttgtgcagctcctgg

SEQ ID NO: 2132 - DNA, 20 bp, synthetic construct
  misc_feature 1..20: note = Description of Artificial Sequence: Synthetic PCR primer
  source 1..20: mol_type = other DNA
ctcgtgggaggccaacacct

SEQ ID NO: 2133 - DNA, 22 bp, synthetic construct
  misc_feature 1..22: note = Description of Artificial Sequence: Synthetic PCR primer
  source 1..22: mol_type = other DNA
agccaccaacacataccaggct

SEQ ID NO: 2134 - DNA, 23 bp, synthetic construct
  misc_feature 1..23: note = Description of Artificial Sequence: Synthetic expected off-target sequence
  source 1..23: mol_type = other DNA
ccactcctttctgcagcacccgg

SEQ ID NO: 2135 - DNA, 20 bp, synthetic construct
  misc_feature 1..20: note = Description of Artificial Sequence: Synthetic PCR primer
  source 1..20: mol_type = other DNA
gcatgcctttaatcccggct

SEQ ID NO: 2136 - DNA, 22 bp, synthetic construct
  misc_feature 1..22: note = Description of Artificial Sequence: Synthetic PCR primer
  source 1..22: mol_type = other DNA
aggatttcagagtgatggggct

SEQ ID NO: 2137 - DNA, 23 bp, synthetic construct
  misc_feature 1..23: note = Description of Artificial Sequence: Synthetic expected off-target sequence
  source 1..23: mol_type = other DNA
gaaggcccttcagcagcacctgg

SEQ ID NO: 2138 - DNA, 20 bp, synthetic construct
  misc_feature 1..20: note = Description of Artificial Sequence: Synthetic PCR primer
  source 1..20: mol_type = other DNA
cgcccagccacaaagtgcat

SEQ ID NO: 2139 - DNA, 27 bp, synthetic construct
  misc_feature 1..27: note = Description of Artificial Sequence: Synthetic PCR primer
  source 1..27: mol_type = other DNA
gcaaatttctgcacctactctaggcct

SEQ ID NO: 2140 - DNA, 23 bp, synthetic construct
  misc_feature 1..23: note = Description of Artificial Sequence: Synthetic expected off-target sequence
  source 1..23: mol_type = other DNA
gatatcccttctgtatcacctgg

SEQ ID NO: 2141 - DNA, 26 bp, synthetic construct
  misc_feature 1..26: note = Description of Artificial Sequence: Synthetic PCR primer
  source 1..26: mol_type = other DNA
agctcacaagaattggaggtaacagt

SEQ ID NO: 2142 - DNA, 22 bp, synthetic construct
  misc_feature 1..22: note = Description of Artificial Sequence: Synthetic PCR primer
  source 1..22: mol_type = other DNA
gcagtcacccttcactgcctgt

SEQ ID NO: 2143 - DNA, 23 bp, synthetic construct
  misc_feature 1..23: note = Description of Artificial Sequence: Synthetic expected off-target sequence
  source 1..23: mol_type = other DNA
gggtccgcttctgcagcacctgg

SEQ ID NO: 2144 - DNA, 20 bp, synthetic construct
  misc_feature 1..20: note = Description of Artificial Sequence: Synthetic PCR primer
  source 1..20: mol_type = other DNA
aaactgggctgggcttccgg

SEQ ID NO: 2145 - DNA, 23 bp, synthetic construct
  misc_feature 1..23: note = Description of Artificial Sequence: Synthetic PCR primer
  source 1..23: mol_type = other DNA
ggggctaaggcattgtcagaccc

SEQ ID NO: 2146 - DNA, 23 bp, synthetic construct
  misc_feature 1..23: note = Description of Artificial Sequence: Synthetic expected off-target sequence
  source 1..23: mol_type = other DNA
gtctccccttctgcagcaccagg

SEQ ID NO: 2147 - DNA, 20 bp, synthetic construct
  misc_feature 1..20: note = Description of Artificial Sequence: Synthetic PCR primer
  source 1..20: mol_type = other DNA
gcaggtaggcagtctggggc

SEQ ID NO: 2148 - DNA, 20 bp, synthetic construct
  misc_feature 1..20: note = Description of Artificial Sequence: Synthetic PCR primer
  source 1..20: mol_type = other DNA
tctcctgcctcagcctccca

SEQ ID NO: 2149 - DNA, 23 bp, synthetic construct
  misc_feature 1..23: note = Description of Artificial Sequence: Synthetic expected off-target sequence
  source 1..23: mol_type = other DNA
gtctccccttctgcagcaccagg

SEQ ID NO: 2150 - DNA, 20 bp, synthetic construct
  misc_feature 1..20: note = Description of Artificial Sequence: Synthetic PCR primer
  source 1..20: mol_type = other DNA
gcaggtaggcagtctggggc

SEQ ID NO: 2151 - DNA, 20 bp, synthetic construct
  misc_feature 1..20: note = Description of Artificial Sequence: Synthetic PCR primer
  source 1..20: mol_type = other DNA
tctcctgcctcagcctccca

SEQ ID NO: 2152 - DNA, 23 bp, synthetic construct
  misc_feature 1..23: note = Description of Artificial Sequence: Synthetic expected off-target sequence
  source 1..23: mol_type = other DNA
gtctccccttctgcagcaccagg

SEQ ID NO: 2153 - DNA, 20 bp, synthetic construct
  misc_feature 1..20: note = Description of Artificial Sequence: Synthetic PCR primer
  source 1..20: mol_type = other DNA
gcaggtaggcagtctggggc

SEQ ID NO: 2154 - DNA, 20 bp, synthetic construct
  misc_feature 1..20: note = Description of Artificial Sequence: Synthetic PCR primer
  source 1..20: mol_type = other DNA
tctcctgcctcagcctccca

SEQ ID NO: 2155 - DNA, 23 bp, synthetic construct
  misc_feature 1..23: note = Description of Artificial Sequence: Synthetic expected off-target sequence
  source 1..23: mol_type = other DNA
tcattcccgtctgcagcacccgg

SEQ ID NO: 2156 - DNA, 20 bp, synthetic construct
  misc_feature 1..20: note = Description of Artificial Sequence: Synthetic PCR primer
  source 1..20: mol_type = other DNA
gctctggggtagaaggaggc

SEQ ID NO: 2157 - DNA, 20 bp, synthetic construct
  misc_feature 1..20: note = Description of Artificial Sequence: Synthetic PCR primer
  source 1..20: mol_type = other DNA
ggcctgtcaaccaaccaacc

SEQ ID NO: 2158 - DNA, 23 bp, synthetic construct
  misc_feature 1..23: note = Description of Artificial Sequence: Synthetic expected off-target sequence
  source 1..23: mol_type = other DNA
tgcacccctcctgcagcaccagg

SEQ ID NO: 2159 - DNA, 20 bp, synthetic construct
  misc_feature 1..20: note = Description of Artificial Sequence: Synthetic PCR primer
  source 1..20: mol_type = other DNA
tgacatgttgtgtgctgggc

SEQ ID NO: 2160 - DNA, 20 bp, synthetic construct
  misc_feature 1..20: note = Description of Artificial Sequence: Synthetic PCR primer
  source 1..20: mol_type = other DNA
aaatcctgcagcctcccctt

SEQ ID NO: 2161 - DNA, 23 bp, synthetic construct
  misc_feature 1..23: note = Description of Artificial Sequence: Synthetic expected off-target sequence
  source 1..23: mol_type = other DNA
tgcataccctctgcagcaccagg

SEQ ID NO: 2162 - DNA, 23 bp, synthetic construct
  misc_feature 1..23: note = Description of Artificial Sequence: Synthetic PCR primer
  source 1..23: mol_type = other DNA
tcctggtgagatcgtccacagga

SEQ ID NO: 2163 - DNA, 20 bp, synthetic construct
  misc_feature 1..20: note = Description of Artificial Sequence: Synthetic PCR primer
  source 1..20: mol_type = other DNA
tcctccccactcagcctccc

SEQ ID NO: 2164 - DNA, 23 bp, synthetic construct
  misc_feature 1..23: note = Description of Artificial Sequence: Synthetic expected off-target sequence
  source 1..23: mol_type = other DNA
tgcatggcttctgcagcaccagg

SEQ ID NO: 2165 - DNA, 27 bp, synthetic construct
  misc_feature 1..27: note = Description of Artificial Sequence: Synthetic PCR primer
  source 1..27: mol_type = other DNA
tcctaatccaagtcctttgttcagaca

SEQ ID NO: 2166 - DNA, 22 bp, synthetic construct
  misc_feature 1..22: note = Description of Artificial Sequence: Synthetic PCR primer
  source 1..22: mol_type = other DNA
agggaccagccactacccttca

SEQ ID NO: 2167 - DNA, 23 bp, synthetic construct
  misc_feature 1..23: note = Description of Artificial Sequence: Synthetic expected off-target sequence
  source 1..23: mol_type = other DNA
aatattccctctgcagcaccagg

SEQ ID NO: 2168 - DNA, 20 bp, synthetic construct
  misc_feature 1..20: note = Description of Artificial Sequence: Synthetic PCR primer
  source 1..20: mol_type = other DNA
gggacaccagttccttccat

SEQ ID NO: 2169 - DNA, 20 bp, synthetic construct
  misc_feature 1..20: note = Description of Artificial Sequence: Synthetic PCR primer
  source 1..20: mol_type = other DNA
gggggagattggagttcccc

SEQ ID NO: 2170 - DNA, 23 bp, synthetic construct
  misc_feature 1..23: note = Description of Artificial Sequence: Synthetic expected off-target sequence
  source 1..23: mol_type = other DNA
accatttcttctgcagcacctgg

SEQ ID NO: 2171 - DNA, 25 bp, synthetic construct
  misc_feature 1..25: note = Description of Artificial Sequence: Synthetic PCR primer
  source 1..25: mol_type = other DNA
acaccactatcaaggcagagtaggt

SEQ ID NO: 2172 - DNA, 20 bp, synthetic construct
  misc_feature 1..20: note = Description of Artificial Sequence: Synthetic PCR primer
  source 1..20: mol_type = other DNA
tctgcctggggtgctttccc

SEQ ID NO: 2173 - DNA, 23 bp, synthetic construct
  misc_feature 1..23: note = Description of Artificial Sequence: Synthetic expected off-target sequence
  source 1..23: mol_type = other DNA
agctcccattctgcagcacccgg

SEQ ID NO: 2174 - DNA, 20 bp, synthetic construct
  misc_feature 1..20: note = Description of Artificial Sequence: Synthetic PCR primer
  source 1..20: mol_type = other DNA
ctgggagcggagggaagtgc

SEQ ID NO: 2175 - DNA, 20 bp, synthetic construct
  misc_feature 1..20: note = Description of Artificial Sequence: Synthetic PCR primer
  source 1..20: mol_type = other DNA
gccccgacagatgaggcctc

SEQ ID NO: 2176 - DNA, 23 bp, synthetic construct
  misc_feature 1..23: note = Description of Artificial Sequence: Synthetic expected off-target sequence
  source 1..23: mol_type = other DNA
cagattcctgctgcagcaccggg

SEQ ID NO: 2177 - DNA, 20 bp, synthetic construct
  misc_feature 1..20: note = Description of Artificial Sequence: Synthetic PCR primer
  source 1..20: mol_type = other DNA
cgggtctcggaatgcctcca

SEQ ID NO: 2178 - DNA, 20 bp, synthetic construct
  misc_feature 1..20: note = Description of Artificial Sequence: Synthetic PCR primer
  source 1..20: mol_type = other DNA
acccaggaattgccaccccc

SEQ ID NO: 2179 - DNA, 23 bp, synthetic construct
  misc_feature 1..23: note = Description of Artificial Sequence: Synthetic expected off-target sequence
  source 1..23: mol_type = other DNA
ccaagagcttctgcagcacctgg

SEQ ID NO: 2180 - DNA, 20 bp, synthetic construct
  misc_feature 1..20: note = Description of Artificial Sequence: Synthetic PCR primer
  source 1..20: mol_type = other DNA
ttgctgtggtcccggtggtg

SEQ ID NO: 2181 - DNA, 20 bp, synthetic construct
  misc_feature 1..20: note = Description of Artificial Sequence: Synthetic PCR primer
  source 1..20: mol_type = other DNA
gcagacactagagcccgccc

SEQ ID NO: 2182 - DNA, 23 bp, synthetic construct
  misc_feature 1..23: note = Description of Artificial Sequence: Synthetic expected off-target sequence
  source 1..23: mol_type = other DNA
cccagccctgctgcagcacccgg

SEQ ID NO: 2183 - DNA, 20 bp, synthetic construct
  misc_feature 1..20: note = Description of Artificial Sequence: Synthetic PCR primer
  source 1..20: mol_type = other DNA
ggtgtggtgacaggtcgggt

SEQ ID NO: 2184 - DNA, 20 bp, synthetic construct
  misc_feature 1..20: note = Description of Artificial Sequence: Synthetic PCR primer
  source 1..20: mol_type = other DNA
acctgcgtctctgtgctgca

SEQ ID NO: 2185 - DNA, 23 bp, synthetic construct
  misc_feature 1..23: note = Description of Artificial Sequence: Synthetic expected off-target sequence
  source 1..23: mol_type = other DNA
cccctccctcctgcagcaccggg

SEQ ID NO: 2186 - DNA, 20 bp, synthetic construct
  misc_feature 1..20: note = Description of Artificial Sequence: Synthetic PCR primer
  source 1..20: mol_type = other DNA
ctcccaggacagtgctcggc

SEQ ID NO: 2187 - DNA, 19 bp, synthetic construct
  misc_feature 1..19: note = Description of Artificial Sequence: Synthetic PCR primer
  source 1..19: mol_type = other DNA
cctggccccatgctgcctg

SEQ ID NO: 2188 - DNA, 23 bp, synthetic construct
  misc_feature 1..23: note = Description of Artificial Sequence: Synthetic expected off-target sequence
  source 1..23: mol_type = other DNA
ctactgacttctgcagcacctgg

SEQ ID NO: 2189 - DNA, 22 bp, synthetic construct
  misc_feature 1..22: note = Description of Artificial Sequence: Synthetic PCR primer
  source 1..22: mol_type = other DNA
tgcgtaggttttgcctctgtga

SEQ ID NO: 2190 - DNA, 24 bp, synthetic construct
  misc_feature 1..24: note = Description of Artificial Sequence: Synthetic PCR primer
  source 1..24: mol_type = other DNA
agggaatgatgttttccaccccct

SEQ ID NO: 2191 - DNA, 23 bp, synthetic construct
  misc_feature 1..23: note = Description of Artificial Sequence: Synthetic expected off-target sequence
  source 1..23: mol_type = other DNA
ctcctccctcctgcagcacctgg

SEQ ID NO: 2192 - DNA, 20 bp, synthetic construct
  misc_feature 1..20: note = Description of Artificial Sequence: Synthetic PCR primer
  source 1..20: mol_type = other DNA
ctccgcagccaccgttggta

SEQ ID NO: 2193 - DNA, 22 bp, synthetic construct
  misc_feature 1..22: note = Description of Artificial Sequence: Synthetic PCR primer
  source 1..22: mol_type = other DNA
tgcattgacgtacgatggctca

SEQ ID NO: 2194 - DNA, 23 bp, synthetic construct
  misc_feature 1..23: note = Description of Artificial Sequence: Synthetic expected off-target sequence
  source 1..23: mol_type = other DNA
tctgtccctcctgcagcacctgg

SEQ ID NO: 2195 - DNA, 22 bp, synthetic construct
  misc_feature 1..22: note = Description of Artificial Sequence: Synthetic PCR primer
  source 1..22: mol_type = other DNA
acctgcagcatgaactctcgca

SEQ ID NO: 2196 - DNA, 24 bp, synthetic construct
  misc_feature 1..24: note = Description of Artificial Sequence: Synthetic PCR primer
  source 1..24: mol_type = other DNA
acctgagcaacatgactcacctgg

SEQ ID NO: 2197 - DNA, 23 bp, synthetic construct
  misc_feature 1..23: note = Description of Artificial Sequence: Synthetic expected off-target sequence
  source 1..23: mol_type = other DNA
acacaaacttctgcagcacctgg

SEQ ID NO: 2198 - DNA, 23 bp, synthetic construct
  misc_feature 1..23: note = Description of Artificial Sequence: Synthetic PCR primer
  source 1..23: mol_type = other DNA
tctccagtttcttgctctcatgg

SEQ ID NO: 2199 - DNA, 20 bp, synthetic construct
  misc_feature 1..20: note = Description of Artificial Sequence: Synthetic PCR primer
  source 1..20: mol_type = other DNA
accattggtgaacccagtca

SEQ ID NO: 2200 - DNA, 23 bp, synthetic construct
  misc_feature 1..23: note = Description of Artificial Sequence: Synthetic expected off-target sequence
  source 1..23: mol_type = other DNA
actgtcatttctgcagcacctgg

SEQ ID NO: 2201 - DNA, 22 bp, synthetic construct
  misc_feature 1..22: note = Description of Artificial Sequence: Synthetic PCR primer
  source 1..22: mol_type = other DNA
tggggtggtggtcttgaatcca

SEQ ID NO: 2202 - DNA, 25 bp, synthetic construct
  misc_feature 1..25: note = Description of Artificial Sequence: Synthetic PCR primer
  source 1..25: mol_type = other DNA
tcagctataacctgggacttgtgct

SEQ ID NO: 2203 - DNA, 23 bp, synthetic construct
  misc_feature 1..23: note = Description of Artificial Sequence: Synthetic expected off-target sequence
  source 1..23: mol_type = other DNA
actttatcttctgcagcacctgg

SEQ ID NO: 2204 - DNA, 21 bp, synthetic construct
  misc_feature 1..21: note = Description of Artificial Sequence: Synthetic PCR primer
  source 1..21: mol_type = other DNA
agcagccagtccagtgtcctg

SEQ ID NO: 2205 - DNA, 23 bp, synthetic construct
  misc_feature 1..23: note = Description of Artificial Sequence: Synthetic PCR primer
  source 1..23: mol_type = other DNA
ccctttcatcgagaaccccaggg

SEQ ID NO: 2206 - DNA, 23 bp, synthetic construct
  misc_feature 1..23: note = Description of Artificial Sequence: Synthetic expected off-target sequence
  source 1..23: mol_type = other DNA
atcctttcttctgcagcacctgg

SEQ ID NO: 2207 - DNA, 20 bp, synthetic construct
  misc_feature 1..20: note = Description of Artificial Sequence: Synthetic PCR primer
  source 1..20: mol_type = other DNA
tggacgctgctgggaggaga

SEQ ID NO: 2208 - DNA, 20 bp, synthetic construct
  misc_feature 1..20: note = Description of Artificial Sequence: Synthetic PCR primer
  source 1..20: mol_type = other DNA
gaggtctcgggctgctcgtg

SEQ ID NO: 2209 - DNA, 23 bp, synthetic construct
  misc_feature 1..23: note = Description of Artificial Sequence: Synthetic expected off-target sequence
  source 1..23: mol_type = other DNA
caccaccgttctgcagcaccagg

SEQ ID NO: 2210 - DNA, 22 bp, synthetic construct
  misc_feature 1..22: note = Description of Artificial Sequence: Synthetic PCR primer
  source 1..22: mol_type = other DNA
aggtttgcactctgttgcctgg

SEQ ID NO: 2211 - DNA, 21 bp, synthetic construct
  misc_feature 1..21: note = Description of Artificial Sequence: Synthetic PCR primer
  source 1..21: mol_type = other DNA
tggggtgattggttgccaggt

SEQ ID NO: 2212 - DNA, 23 bp, synthetic construct
  misc_feature 1..23: note = Description of Artificial Sequence: Synthetic expected off-target sequence
  source 1..23: mol_type = other DNA
catgtggcttctgcagcacctgg

SEQ ID NO: 2213 - DNA, 22 bp, synthetic construct
  misc_feature 1..22: note = Description of Artificial Sequence: Synthetic PCR primer
  source 1..22: mol_type = other DNA
tcttcctttgccaggcagcaca

SEQ ID NO: 2214 - DNA, 25 bp, synthetic construct
  misc_feature 1..25: note = Description of Artificial Sequence: Synthetic PCR primer
  source 1..25: mol_type = other DNA
tgcaggaatagcaggtatgaggagt

SEQ ID NO: 2215 - DNA, 23 bp, synthetic construct
  misc_feature 1..23: note = Description of Artificial Sequence: Synthetic expected off-target sequence
  source 1..23: mol_type = other DNA
cattttctttctgcagcacctgg

SEQ ID NO: 2216 - DNA, 20 bp, synthetic construct
  misc_feature 1..20: note = Description of Artificial Sequence: Synthetic PCR primer
  source 1..20: mol_type = other DNA
ggacgcctactgcctggacc

SEQ ID NO: 2217 - DNA, 20 bp, synthetic construct
  misc_feature 1..20: note = Description of Artificial Sequence: Synthetic PCR primer
  source 1..20: mol_type = other DNA
gccctggcagcccatggtac

SEQ ID NO: 2218 - DNA, 23 bp, synthetic construct
  misc_feature 1..23: note = Description of Artificial Sequence: Synthetic expected off-target sequence
  source 1..23: mol_type = other DNA
ctctgtccttctgcagcacctgg

SEQ ID NO: 2219 - DNA, 20 bp, synthetic construct
  misc_feature 1..20: note = Description of Artificial Sequence: Synthetic PCR primer
  source 1..20: mol_type = other DNA
aggcagtcatcgccttgcta

SEQ ID NO: 2220 - DNA, 20 bp, synthetic construct
  misc_feature 1..20: note = Description of Artificial Sequence: Synthetic PCR primer
  source 1..20: mol_type = other DNA
ggtcccaccttcccctacaa

SEQ ID NO: 2221 - DNA, 23 bp, synthetic construct
  misc_feature 1..23: note = Description of Artificial Sequence: Synthetic expected off-target sequence
  source 1..23: mol_type = other DNA
ctgtaccctcctgcagcaccagg

SEQ ID NO: 2222 - DNA, 23 bp, synthetic construct
  misc_feature 1..23: note = Description of Artificial Sequence: Synthetic expected off-target sequence
  source 1..23: mol_type = other DNA
ttgaggccgtctgcagcaccggg

SEQ ID NO: 2223 - DNA, 20 bp, synthetic construct
  misc_feature 1..20: note = Description of Artificial Sequence: Synthetic PCR primer
  source 1..20: mol_type = other DNA
ccccagcccccaccagtttc

SEQ ID NO: 2224 - DNA, 20 bp, synthetic construct
  misc_feature 1..20: note = Description of Artificial Sequence: Synthetic PCR primer
  source 1..20: mol_type = other DNA
cagcccaggccacagcttca

SEQ ID NO: 2225 - DNA, 23 bp, synthetic construct
  misc_feature 1..23: note = Description of Artificial Sequence: Synthetic actual target site sequence
  source 1..23: mol_type = other DNA
gggtgattgaagtttgctccagg

SEQ ID NO: 2226 - DNA, 23 bp, synthetic construct
  misc_feature 1..23: note = Description of Artificial Sequence: Synthetic actual target site sequence
  source 1..23: mol_type = other DNA
gggtgattgaagtttgctgcagg

SEQ ID NO: 2227 - DNA, 23 bp, synthetic construct
  misc_feature 1..23: note = Description of Artificial Sequence: Synthetic actual target site sequence
  source 1..23: mol_type = other DNA
ctctccccccaccccccctctgg

SEQ ID NO: 2228 - DNA, 22 bp, synthetic construct
  misc_feature 1..22: note = Description of Artificial Sequence: Synthetic actual target site sequence
  source 1..22: mol_type = other DNA
atttcctcccccccccctcagg

SEQ ID NO: 2229 - DNA, 23 bp, synthetic construct
  misc_feature 1..23: note = Description of Artificial Sequence: Synthetic actual target site sequence
  source 1..23: mol_type = other DNA
aagacagaggagaagaagaaggg

SEQ ID NO: 2230 - DNA, 23 bp, synthetic construct
  misc_feature 1..23: note = Description of Artificial Sequence: Synthetic actual target site sequence
  source 1..23: mol_type = other DNA
tcattgyagcagaagaagaaagg

SEQ ID NO: 2231 - DNA, 23 bp, synthetic construct
  misc_feature 1..23: note = Description of Artificial Sequence: Synthetic actual target site sequence
  source 1..23: mol_type = other DNA
ggtatctaagtcattacctgtgg

SEQ ID NO: 2232 - DNA, 23 bp, synthetic construct
  misc_feature 1..23: note = Description of Artificial Sequence: Synthetic actual target site sequence
  source 1..23: mol_type = other DNA
ggtatctaagtcaatacctgtgg

SEQ ID NO: 2233 - DNA, 23 bp, synthetic construct
  misc_feature 1..23: note = Description of Artificial Sequence: Synthetic actual target site sequence
  source 1..23: mol_type = other DNA
tccatctcactcattacctgagg

SEQ ID NO: 2234 - DNA, 23 bp, synthetic construct
  misc_feature 1..23: note = Description of Artificial Sequence: Synthetic actual target site sequence
  source 1..23: mol_type = other DNA
tccatctcactcattacctgatg

SEQ ID NO: 2235 - DNA, 23 bp, synthetic construct
  misc_feature 1..23: note = Description of Artificial Sequence: Synthetic actual target site sequence
  source 1..23: mol_type = other DNA
tttatattagtgattacctgcgg

SEQ ID NO: 2236 - DNA, 23 bp, synthetic construct
  misc_feature 1..23: note = Description of Artificial Sequence: Synthetic actual target site sequence
  source 1..23: mol_type = other DNA
ggaatcccctctccagcccctgg

SEQ ID NO: 2237 - DNA, 23 bp, synthetic construct
  misc_feature 1..23: note = Description of Artificial Sequence: Synthetic actual target site sequence
  source 1..23: mol_type = other DNA
ggaatcccctctccagcctctgg

SEQ ID NO: 2238 - DNA, 23 bp, synthetic construct
  misc_feature 1..23: note = Description of Artificial Sequence: Synthetic actual target site sequence
  source 1..23: mol_type = other DNA
ggaatctcttccttggcatctgg

SEQ ID NO: 2239 - DNA, 23 bp, synthetic construct
  misc_feature 1..23: note = Description of Artificial Sequence: Synthetic actual target site sequence
  source 1..23: mol_type = other DNA
cagattactgctgcagcaccggg

SEQ ID NO: 2240 - DNA, 23 bp, synthetic construct
  misc_feature 1..23: note = Description of Artificial Sequence: Synthetic actual target site sequence
  source 1..23: mol_type = other DNA
acacaaacttctgcagcacstgg

SEQ ID NO: 2241 - DNA, 23 bp, synthetic construct
  misc_feature 1..23: note = Description of Artificial Sequence: Synthetic target site sequence in EGFP reporter gene
  source 1..23: mol_type = other DNA
ggcgagggcgatgccacctacgg

SEQ ID NO: 2242 - DNA, 23 bp, synthetic construct
  misc_feature 1..23: note = Description of Artificial Sequence: Synthetic standard RGN on-target sequence
  source 1..23: mol_type = other DNA
gggtggggggagtttgctcctgg

SEQ ID NO: 2243 - DNA, 21 bp, synthetic construct
  misc_feature 1..21: note = Description of Artificial Sequence: Synthetic truncated RGN on-target sequence
  source 1..21: mol_type = other DNA
gtggggggagtttgctcctgg

SEQ ID NO: 2244 - DNA, 23 bp, synthetic construct
  misc_feature 1..23: note = Description of Artificial Sequence: Synthetic standard RGN off-target sequence
  source 1..23: mol_type = other DNA
ggatggagggagtttgctcctgg

SEQ ID NO: 2245 - DNA, 21 bp, synthetic construct
  misc_feature 1..21: note = Description of Artificial Sequence: Synthetic truncated RGN off-target sequence
  source 1..21: mol_type = other DNA
atggagggagtttgctcctgg

SEQ ID NO: 2246 - DNA, 23 bp, synthetic construct
  misc_feature 1..23: note = Description of Artificial Sequence: Synthetic standard RGN off-target sequence
  source 1..23: mol_type = other DNA
gggagggtggagtttgctcctgg

SEQ ID NO: 2247 - DNA, 21 bp, synthetic construct
  misc_feature 1..21: note = Description of Artificial Sequence: Synthetic truncated RGN off-target sequence
  source 1..21: mol_type = other DNA
gagggtggagtttgctcctgg

SEQ ID NO: 2248 - DNA, 23 bp, synthetic construct
  misc_feature 1..23: note = Description of Artificial Sequence: Synthetic standard RGN off-target sequence
  source 1..23: mol_type = other DNA
cgggggagggagtttgctcctgg

SEQ ID NO: 2249 - DNA, 21 bp, synthetic construct
  misc_feature 1..21: note = Description of Artificial Sequence: Synthetic truncated RGN off-target sequence
  source 1..21: mol_type = other DNA
ggggagggagtttgctcctgg

SEQ ID NO: 2250 - DNA, 23 bp, synthetic construct
  misc_feature 1..23: note = Description of Artificial Sequence: Synthetic standard RGN off-target sequence
  source 1..23: mol_type = other DNA
ggggaggggaagtttgctcctgg

SEQ ID NO: 2251 - DNA, 21 bp, synthetic construct
  misc_feature 1..21: note = Description of Artificial Sequence: Synthetic truncated RGN off-target sequence
  source 1..21: mol_type = other DNA
ggaggggaagtttgctcctgg

SEQ ID NO: 2252 - DNA, 23 bp, synthetic construct
  misc_feature 1..23: note = Description of Artificial Sequence: Synthetic standard RGN on-target sequence
  source 1..23: mol_type = other DNA
ggtgagtgagtgtgtgcgtgtgg

SEQ ID NO: 2253 - DNA, 20 bp, synthetic construct
  misc_feature 1..20: note = Description of Artificial Sequence: Synthetic truncated RGN on-target sequence
  source 1..20: mol_type = other DNA
gagtgagtgtgtgcgtgtgg

SEQ ID NO: 2254 - DNA, 23 bp, synthetic construct
  misc_feature 1..23: note = Description of Artificial Sequence: Synthetic standard RGN off-target sequence
  source 1..23: mol_type = other DNA
ggtgagtgagtgtgtgtgtgagg

SEQ ID NO: 2255 - DNA, 20 bp, synthetic construct
  misc_feature 1..20: note = Description of Artificial Sequence: Synthetic truncated RGN off-target sequence
  source 1..20: mol_type = other DNA
gagtgagtgtgtgtgtgagg

SEQ ID NO: 2256 - DNA, 23 bp, synthetic construct
  misc_feature 1..23: note = Description of Artificial Sequence: Synthetic standard RGN off-target sequence
  source 1..23: mol_type = other DNA
agtgagtgagtgtgtgtgtgggg

SEQ ID NO: 2257 - DNA, 20 bp, synthetic construct
  misc_feature 1..20: note = Description of Artificial Sequence: Synthetic truncated RGN off-target sequence
  source 1..20: mol_type = other DNA
gagtgagtgtgtgtgtgggg

SEQ ID NO: 2258 - DNA, 23 bp, synthetic construct
  misc_feature 1..23: note = Description of Artificial Sequence: Synthetic standard RGN off-target sequence
  source 1..23: mol_type = other DNA
gctgagtgagtgtatgcgtgtgg

SEQ ID NO: 2259 - DNA, 20 bp, synthetic construct
  misc_feature 1..20: note = Description of Artificial Sequence: Synthetic truncated RGN off-target sequence
  source 1..20: mol_type = other DNA
gagtgagtgtatgcgtgtgg

SEQ ID NO: 2260 - DNA, 23 bp, synthetic construct
  misc_feature 1..23: note = Description of Artificial Sequence: Synthetic standard RGN off-target sequence
  source 1..23: mol_type = other DNA
ggtgagtgagtgcgtgcgggtgg

SEQ ID NO: 2261 - DNA, 20 bp, synthetic construct
  misc_feature 1..20: note = Description of Artificial Sequence: Synthetic truncated RGN off-target sequence
  source 1..20: mol_type = other DNA
gagtgagtgcgtgcgggtgg

SEQ ID NO: 2262 - DNA, 23 bp, synthetic construct
  misc_feature 1..23: note = Description of Artificial Sequence: Synthetic standard RGN off-target sequence
  source 1..23: mol_type = other DNA
gttgagtgaatgtgtgcgtgagg

SEQ ID NO: 2263 - DNA, 20 bp, synthetic construct
  misc_feature 1..20: note = Description of Artificial Sequence: Synthetic truncated RGN off-target sequence
  source 1..20: mol_type = other DNA
gagtgaatgtgtgcgtgagg

SEQ ID NO: 2264 - DNA, 23 bp, synthetic construct
  misc_feature 1..23: note = Description of Artificial Sequence: Synthetic standard RGN off-target sequence
  source 1..23: mol_type = other DNA
tgtgggtgagtgtgtgcgtgagg

SEQ ID NO: 2265 - DNA, 20 bp, synthetic construct
  misc_feature 1..20: note = Description of Artificial Sequence: Synthetic truncated RGN off-target sequence
  source 1..20: mol_type = other DNA
gggtgagtgtgtgcgtgagg

SEQ ID NO: 2266 - DNA, 23 bp, synthetic construct
  misc_feature 1..23: note = Description of Artificial Sequence: Synthetic standard RGN off-target sequence
  source 1..23: mol_type = other DNA
agagagtgagtgtgtgcatgagg

SEQ ID NO: 2267 - DNA, 20 bp, synthetic construct
  misc_feature 1..20: note = Description of Artificial Sequence: Synthetic truncated RGN off-target sequence
  source 1..20: mol_type = other DNA
gagtgagtgtgtgcatgagg

SEQ ID NO: 2268 - DNA, 23 bp, synthetic construct
  misc_feature 1..23: note = Description of Artificial Sequence: Synthetic standard RGN on-target sequence
  source 1..23: mol_type = other DNA
gagtccgagcagaagaagaaggg

SEQ ID NO: 2269 - DNA, 21 bp, synthetic construct
  misc_feature 1..21: note = Description of Artificial Sequence: Synthetic truncated RGN on-target sequence
  source 1..21: mol_type = other DNA
gtccgagcagaagaagaaggg

SEQ ID NO: 2270 - DNA, 23 bp, synthetic construct
  misc_feature 1..23: note = Description of Artificial Sequence: Synthetic standard RGN off-target sequence
  source 1..23: mol_type = other DNA
gagttagagcagaagaagaaagg

SEQ ID NO: 2271 - DNA, 21 bp, synthetic construct
  misc_feature 1..21: note = Description of Artificial Sequence: Synthetic truncated RGN off-target sequence
  source 1..21: mol_type = other DNA
gttagagcagaagaagaaagg

SEQ ID NO: 2272 - DNA, 23 bp, synthetic construct
  misc_feature 1..23: note = Description of Artificial Sequence: Synthetic standard RGN off-target sequence
  source 1..23: mol_type = other DNA
gagtctaagcagaagaagaagag

SEQ ID NO: 2273 - DNA, 21 bp, synthetic construct
  misc_feature 1..21: note = Description of Artificial Sequence: Synthetic truncated RGN off-target sequence
  source 1..21: mol_type = other DNA
gtctaagcagaagaagaagag

SEQ ID NO: 2274 - DNA, 21 bp, synthetic construct
  misc_feature 1..21: note = Description of Artificial Sequence: Synthetic truncated RGN on-target sequence + PAM for VEGFA
  source 1..21: mol_type = other DNA
gtggggggagtttgctcctgg

SEQ ID NO: 2275 - DNA, 21 bp, synthetic construct
  misc_feature 1..21: note = Description of Artificial Sequence: Synthetic potential truncated RGN off-target sequence + PAM for VEGFA
  source 1..21: mol_type = other DNA
gtggggggagtttgccccagg

SEQ ID NO: 2276 - DNA, 21 bp, synthetic construct
  misc_feature 1..21: note = Description of Artificial Sequence: Synthetic potential truncated RGN off-target sequence + PAM for VEGFA
  source 1..21: mol_type = other DNA
gtggggggtgtttgctcccgg

SEQ ID NO: 2277 - DNA, 21 bp, synthetic construct
  misc_feature 1..21: note = Description of Artificial Sequence: Synthetic potential truncated RGN off-target sequence + PAM for VEGFA
  source 1..21: mol_type = other DNA
gtgggtggagtttgctactgg

SEQ ID NO: 2278 - DNA, 21 bp, synthetic construct
  misc_feature 1..21: note = Description of Artificial Sequence: Synthetic potential truncated RGN off-target sequence + PAM for VEGFA
  source 1..21: mol_type = other DNA
gtggggggagctttctcctgg

SEQ ID NO: 2279 - DNA, 21 bp, synthetic construct
  misc_feature 1..21: note = Description of Artificial Sequence: Synthetic potential truncated RGN off-target sequence + PAM for VEGFA
  source 1..21: mol_type = other DNA
gtgggtggcgtttgctccagg

SEQ ID NO: 2280 - DNA, 21 bp, synthetic construct
  misc_feature 1..21: note = Description of Artificial Sequence: Synthetic potential truncated RGN off-target sequence + PAM for VEGFA
  source 1..21: mol_type = other DNA
gtggagggagcttgctcctgg

SEQ ID NO: 2281 - DNA, 21 bp, synthetic construct
  misc_feature 1..21: note = Description of Artificial Sequence: Synthetic potential truncated RGN off-target sequence + PAM for VEGFA
  source 1..21: mol_type = other DNA
gtgggtggagtttgctacagg

SEQ ID NO: 2282 - DNA, 21 bp, synthetic construct
  misc_feature 1..21: note = Description of Artificial Sequence: Synthetic potential truncated RGN off-target sequence + PAM for VEGFA
  source 1..21: mol_type = other DNA
gggggggcagtttgctcctgg

SEQ ID NO: 2283 - DNA, 21 bp, synthetic construct
  misc_feature 1..21: note = Description of Artificial Sequence: Synthetic potential truncated RGN off-target sequence + PAM for VEGFA
  source 1..21: mol_type = other DNA
gtgtggggaatttgctccagg

SEQ ID NO: 2284 - DNA, 21 bp, synthetic construct
  misc_feature 1..21: note = Description of Artificial Sequence: Synthetic potential truncated RGN off-target sequence + PAM for VEGFA
  source 1..21: mol_type = other DNA
ctgctgggagtttgctcctgg

SEQ ID NO: 2285 - DNA, 21 bp, synthetic construct
  misc_feature 1..21: note = Description of Artificial Sequence: Synthetic potential truncated RGN off-target sequence + PAM for VEGFA
  source 1..21: mol_type = other DNA
tttgggagagtttgctccagg

SEQ ID NO: 2286 - DNA, 21 bp, synthetic construct
  misc_feature 1..21: note = Description of Artificial Sequence: Synthetic potential truncated RGN off-target sequence + PAM for VEGFA
  source 1..21: mol_type = other DNA
ctgagggcagtttgctccagg

SEQ ID NO: 2287 - DNA, 21 bp, synthetic construct
  misc_feature 1..21: note = Description of Artificial Sequence: Synthetic potential truncated RGN off-target sequence + PAM for VEGFA
  source 1..21: mol_type = other DNA
gtaagggaagtttgctcctgg

SEQ ID NO: 2288 - DNA, 21 bp, synthetic construct
  misc_feature 1..21: note = Description of Artificial Sequence: Synthetic potential truncated RGN off-target sequence + PAM for VEGFA
  source 1..21: mol_type = other DNA
gggggtagagtttgctccagg

SEQ ID NO: 2289 - DNA, 21 bp, synthetic construct
  misc_feature 1..21: note = Description of Artificial Sequence: Synthetic potential truncated RGN off-target sequence + PAM for VEGFA
  source 1..21: mol_type = other DNA
gggtggggactttgctccagg

SEQ ID NO: 2290 - DNA, 21 bp, synthetic construct
  misc_feature 1..21: note = Description of Artificial Sequence: Synthetic potential truncated RGN off-target sequence + PAM for VEGFA
  source 1..21: mol_type = other DNA
gggggagcagtttgctccagg

SEQ ID NO: 2291 - DNA, 21 bp, synthetic construct
  misc_feature 1..21: note = Description of Artificial Sequence: Synthetic potential truncated RGN off-target sequence + PAM for VEGFA
  source 1..21: mol_type = other DNA
ttggggttagtttgctcctgg

SEQ ID NO: 2292 - DNA, 21 bp, synthetic construct
  misc_feature 1..21: note = Description of Artificial Sequence: Synthetic potential truncated RGN off-target sequence + PAM for VEGFA
  source 1..21: mol_type = other DNA
ttgaggggagtctgctccagg

SEQ ID NO: 2293 - DNA, 21 bp, synthetic construct
  misc_feature 1..21: note = Description of Artificial Sequence: Synthetic potential truncated RGN off-target sequence + PAM for VEGFA
  source 1..21: mol_type = other DNA
ctggggtgattttgctcctgg

SEQ ID NO: 2294 - DNA, 21 bp, synthetic construct
  misc_feature 1..21: note = Description of Artificial Sequence: Synthetic potential truncated RGN off-target sequence + PAM for VEGFA
  source 1..21: mol_type = other DNA
gagaggggagttggctcctgg

SEQ ID NO: 2295 - DNA, 21 bp, synthetic construct
  misc_feature 1..21: note = Description of Artificial Sequence: Synthetic potential truncated RGN off-target sequence + PAM for VEGFA
  source 1..21: mol_type = other DNA
tttgggggagtttgccccagg

SEQ ID NO: 2296 - DNA, 21 bp, synthetic construct
  misc_feature 1..21: note = Description of Artificial Sequence: Synthetic potential truncated RGN off-target sequence + PAM for VEGFA
  source 1..21: mol_type = other DNA
ttcgggggagtttgcgccggg

SEQ ID NO: 2297 - DNA, 21 bp, synthetic construct
  misc_feature 1..21: note = Description of Artificial Sequence: Synthetic potential truncated RGN off-target sequence + PAM for VEGFA
  source 1..21: mol_type = other DNA
ctcgggggagtttgcaccagg

SEQ ID NO: 2298 - DNA, 21 bp, synthetic construct
  misc_feature 1..21: note = Description of Artificial Sequence: Synthetic potential truncated RGN off-target sequence + PAM for VEGFA
  source 1..21: mol_type = other DNA
gtgttgggagtctgctccagg

SEQ ID NO: 2299 - DNA, 21 bp, synthetic construct
  misc_feature 1..21: note = Description of Artificial Sequence: Synthetic potential truncated RGN off-target sequence + PAM for VEGFA
  source 1..21: mol_type = other DNA
gagggggcaggttgctccagg

SEQ ID NO: 2300 - DNA, 21 bp, synthetic construct
  misc_feature 1..21: note = Description of Artificial Sequence: Synthetic potential truncated RGN off-target sequence + PAM for VEGFA
  source 1..21: mol_type = other DNA
gaggggagagtttgttccagg

SEQ ID NO: 2301 - DNA, 21 bp, synthetic construct
  misc_feature 1..21: note = Description of Artificial Sequence: Synthetic potential truncated RGN off-target sequence + PAM for VEGFA
  source 1..21: mol_type = other DNA
gtggctggagtttgctgctgg

SEQ ID NO: 2302 - DNA, 21 bp, synthetic construct
  misc_feature 1..21: note = Description of Artificial Sequence: Synthetic potential truncated RGN off-target sequence + PAM for VEGFA
  source 1..21: mol_type = other DNA
gtcgggggagtgggctccagg

SEQ ID NO: 2303 - DNA, 21 bp, synthetic construct
  misc_feature 1..21: note = Description of Artificial Sequence: Synthetic potential truncated RGN off-target sequence + PAM for VEGFA
  source 1..21: mol_type = other DNA
gaggggggagtgtgttccggg

SEQ ID NO: 2304 - DNA, 21 bp, synthetic construct
  misc_feature 1..21: note = Description of Artificial Sequence: Synthetic potential truncated RGN off-target sequence + PAM for VEGFA
  source 1..21: mol_type = other DNA
gtggtgggagcttgttcctgg

SEQ ID NO: 2305 - DNA, 21 bp, synthetic construct
  misc_feature 1..21: note = Description of Artificial Sequence: Synthetic potential truncated RGN off-target sequence + PAM for VEGFA
  source 1..21: mol_type = other DNA
gtggggggtgcctgctccagg

SEQ ID NO: 2306 - DNA, 20 bp, synthetic construct
  misc_feature 1..20: note = Description of Artificial Sequence: Synthetic truncated RGN on-target sequence + PAM for VEGFA
  source 1..20: mol_type = other DNA
gagtgagtgtgtgcgtgtgg

SEQ ID NO: 2307 - DNA, 20 bp, synthetic construct
  misc_feature 1..20: note = Description of Artificial Sequence: Synthetic potential truncated RGN off-target sequence + PAM for VEGFA
  source 1..20: mol_type = other DNA
cagtgagtgtgtgcgtgtgg

SEQ ID NO: 2308 - DNA, 20 bp, synthetic construct
  misc_feature 1..20: note = Description of Artificial Sequence: Synthetic potential truncated RGN off-target sequence + PAM for VEGFA
  source 1..20: mol_type = other DNA
gtgtgagtgtgtgcgtgggg

SEQ ID NO: 2309 - DNA, 20 bp, synthetic construct
  misc_feature 1..20: note = Description of Artificial Sequence: Synthetic potential truncated RGN off-target sequence + PAM for VEGFA
  source 1..20: mol_type = other DNA
gtgtgagtgtgtgcgtgagg

SEQ ID NO: 2310 - DNA, 20 bp, synthetic construct
  misc_feature 1..20: note = Description of Artificial Sequence: Synthetic potential truncated RGN off-target sequence + PAM for VEGFA
  source 1..20: mol_type = other DNA
gtgtgagtgtgtgcgtgtgg

SEQ ID NO: 2311 - DNA, 20 bp, synthetic construct
  misc_feature 1..20: note = Description of Artificial Sequence: Synthetic potential truncated RGN off-target sequence + PAM for VEGFA
  source 1..20: mol_type = other DNA
gagtgtgtgtgtgcgtgtgg

SEQ ID NO: 2312 - DNA, 20 bp, synthetic construct
  misc_feature 1..20: note = Description of Artificial Sequence: Synthetic potential truncated RGN off-target sequence + PAM for VEGFA
  source 1..20: mol_type = other DNA
gagtgggtgtgtgcgtgggg

SEQ ID NO: 2313 - DNA, 20 bp, synthetic construct
  misc_feature 1..20: note = Description of Artificial Sequence: Synthetic potential truncated RGN off-target sequence + PAM for VEGFA
  source 1..20: mol_type = other DNA
gagtgactgtgtgcgtgtgg

SEQ ID NO: 2314 - DNA, 20 bp, synthetic construct
  misc_feature 1..20: note = Description of Artificial Sequence: Synthetic potential truncated RGN off-target sequence + PAM for VEGFA
  source 1..20: mol_type = other DNA
gagtgagtgtgtgggtgggg

SEQ ID NO: 2315 - DNA, 20 bp, synthetic construct
  misc_feature 1..20: note = Description of Artificial Sequence: Synthetic potential truncated RGN off-target sequence + PAM for VEGFA
  source 1..20: mol_type = other DNA
gagtgagtgtgtgtgtgtgg

SEQ ID NO: 2316 - DNA, 20 bp, synthetic construct
  misc_feature 1..20: note = Description of Artificial Sequence: Synthetic potential truncated RGN off-target sequence + PAM for VEGFA
  source 1..20: mol_type = other DNA
gagtgagtgtgtgtgtgtgg

SEQ ID NO: 2317 - DNA, 20 bp, synthetic construct
  misc_feature 1..20: note = Description of Artificial Sequence: Synthetic potential truncated RGN off-target sequence + PAM for VEGFA
  source 1..20: mol_type = other DNA
gagtgagtgtgtgtgtgggg

SEQ ID NO: 2318 - DNA, 20 bp, synthetic construct
  misc_feature 1..20: note = Description of Artificial Sequence: Synthetic potential truncated RGN off-target sequence + PAM for VEGFA
  source 1..20: mol_type = other DNA
gagtgagtgtgtgtgtgtgg

SEQ ID NO: 2319 - DNA, 20 bp, synthetic construct
  misc_feature 1..20: note = Description of Artificial Sequence: Synthetic potential truncated RGN off-target sequence + PAM for VEGFA
  source 1..20: mol_type = other DNA
gagtgagtgtgtgcgcgggg

SEQ ID NO: 2320 - DNA, 20 bp, synthetic construct
  misc_feature 1..20: note = Description of Artificial Sequence: Synthetic potential truncated RGN off-target sequence + PAM for VEGFA
  source 1..20: mol_type = other DNA
ctgtgagtgtgtgcgtgagg

SEQ ID NO: 2321 - DNA, 20 bp, synthetic construct
  misc_feature 1..20: note = Description of Artificial Sequence: Synthetic potential truncated RGN off-target sequence + PAM for VEGFA
  source 1..20: mol_type = other DNA
atgtgagtgtgtgcgtgtgg

SEQ ID NO: 2322 - DNA, 20 bp, synthetic construct
  misc_feature 1..20: note = Description of Artificial Sequence: Synthetic potential truncated RGN off-target sequence + PAM for VEGFA
  source 1..20: mol_type = other DNA
gcctgagtgtgtgcgtgtgg

SEQ ID NO: 2323 - DNA, 20 bp, synthetic construct
  misc_feature 1..20: note = Description of Artificial Sequence: Synthetic potential truncated RGN off-target sequence + PAM for VEGFA
  source 1..20: mol_type = other DNA
gtgtgtgtgtgtgcgtgtgg

SEQ ID NO: 2324 - DNA, 20 bp, synthetic construct
  misc_feature 1..20: note = Description of Artificial Sequence: Synthetic potential truncated RGN off-target sequence + PAM for VEGFA
  source 1..20: mol_type = other DNA
gtgtgggtgtgtgcgtgtgg

SEQ ID NO: 2325 - DNA, 20 bp, synthetic construct
  misc_feature 1..20: note = Description of Artificial Sequence: Synthetic potential truncated RGN off-target sequence + PAM for VEGFA
  source 1..20: mol_type = other DNA
gcgtgtgtgtgtgcgtgtgg

SEQ ID NO: 2326 - DNA, 20 bp, synthetic construct
  misc_feature 1..20: note = Description of Artificial Sequence: Synthetic potential truncated RGN off-target sequence + PAM for VEGFA
  source 1..20: mol_type = other DNA
gtgtgtgtgtgtgcgtgggg

SEQ ID NO: 2327 - DNA, 20 bp, synthetic construct
  misc_feature 1..20: note = Description of Artificial Sequence: Synthetic potential truncated RGN off-target sequence + PAM for VEGFA
  source 1..20: mol_type = other DNA
gtgtgcgtgtgtgcgtgtgg

SEQ ID NO: 2328 - DNA, 20 bp, synthetic construct
  misc_feature 1..20: note = Description of Artificial Sequence: Synthetic potential truncated RGN off-target sequence + PAM for VEGFA
  source 1..20: mol_type = other DNA
gtgtgtgtgtgtgcgtgcgg

SEQ ID NO: 2329 - DNA, 20 bp, synthetic construct
  misc_feature 1..20: note = Description of Artificial Sequence: Synthetic potential truncated RGN off-target sequence + PAM for VEGFA
  source 1..20: mol_type = other DNA
gagagagagtgtgcgtgtgg

SEQ ID NO: 2330 - DNA, 20 bp, synthetic construct
  misc_feature 1..20: note = Description of Artificial Sequence: Synthetic potential truncated RGN off-target sequence + PAM for VEGFA
  source 1..20: mol_type = other DNA
gagtgtgtgagtgcgtgggg

SEQ ID NO: 2331 - DNA, 20 bp, synthetic construct
  misc_feature 1..20: note = Description of Artificial Sequence: Synthetic potential truncated RGN off-target sequence + PAM for VEGFA
  source 1..20: mol_type = other DNA
gtgtgagtgtgtgtgtgtgg

SEQ ID NO: 2332 - DNA, 20 bp, synthetic construct
  misc_feature 1..20: note = Description of Artificial Sequence: Synthetic potential truncated RGN off-target sequence + PAM for VEGFA
  source 1..20: mol_type = other DNA
gagtgtgtgtatgcgtgtgg

SEQ ID NO: 2333 - DNA, 20 bp, synthetic construct
  misc_feature 1..20: note = Description of Artificial Sequence: Synthetic potential truncated RGN off-target sequence + PAM for VEGFA
  source 1..20: mol_type = other DNA
gagtcagtgtgtgagtgagg

SEQ ID NO: 2334 - DNA, 20 bp, synthetic construct
  misc_feature 1..20: note = Description of Artificial Sequence: Synthetic potential truncated RGN off-target sequence + PAM for VEGFA
  source 1..20: mol_type = other DNA
gagtgtgtgtgtgagtgtgg

SEQ ID NO: 2335 - DNA, 20 bp, synthetic construct
  misc_feature 1..20: note = Description of Artificial Sequence: Synthetic potential truncated RGN off-target sequence + PAM for VEGFA
  source 1..20: mol_type = other DNA
gagtgtgtgtgtgcatgtgg

SEQ ID NO: 2336 - DNA, 20 bp, synthetic construct
  misc_feature 1..20: note = Description of Artificial Sequence: Synthetic potential truncated RGN off-target sequence + PAM for VEGFA
  source 1..20: mol_type = other DNA
gagtgagagtgtgtgtgtgg

SEQ ID NO: 2337 - DNA, 20 bp, synthetic construct
  misc_feature 1..20: note = Description of Artificial Sequence: Synthetic potential truncated RGN off-target sequence + PAM for VEGFA
  source 1..20: mol_type = other DNA
gagtgagtgagtgagtgagg

SEQ ID NO: 2338 - DNA, 21 bp, synthetic construct
  misc_feature 1..21: note = Description of Artificial Sequence: Synthetic truncated RGN on-target sequence + PAM for EMX1
  source 1..21: mol_type = other DNA
gtccgagcagaagaagaaggg

SEQ ID NO: 2339 - DNA, 21 bp, synthetic construct
  misc_feature 1..21: note = Description of Artificial Sequence: Synthetic potential truncated RGN off-target sequence + PAM for EMX1
  source 1..21: mol_type = other DNA
gtctgagcagaagaagaatgg

SEQ ID NO: 2340 - DNA, 21 bp, synthetic construct
  misc_feature 1..21: note = Description of Artificial Sequence: Synthetic potential truncated RGN off-target sequence + PAM for EMX1
  source 1..21: mol_type = other DNA
gtcccagcagtagaagaatgg

SEQ ID NO: 2341 - DNA, 21 bp, synthetic construct
  misc_feature 1..21: note = Description of Artificial Sequence: Synthetic potential truncated RGN off-target sequence + PAM for EMX1
  source 1..21: mol_type = other DNA
gtccgaggagaggaagaaagg

SEQ ID NO: 2342 - DNA, 21 bp, synthetic construct
  misc_feature 1..21: note = Description of Artificial Sequence: Synthetic potential truncated RGN off-target sequence + PAM for EMX1
  source 1..21: mol_type = other DNA
gtcagaggagaagaagaaggg

SEQ ID NO: 2343 - DNA, 21 bp, synthetic construct
  misc_feature 1..21: note = Description of Artificial Sequence: Synthetic potential truncated RGN off-target sequence + PAM for EMX1
  source 1..21: mol_type = other DNA
gacagagcagaagaagaaggg

SEQ ID NO: 2344 - DNA, 21 bp, synthetic construct
  misc_feature 1..21: note = Description of Artificial Sequence: Synthetic potential truncated RGN off-target sequence + PAM for EMX1
  source 1..21: mol_type = other DNA
gtgggagcagaagaagaaggg

SEQ ID NO: 2345 - DNA, 21 bp, synthetic construct
  misc_feature 1..21: note = Description of Artificial Sequence: Synthetic potential truncated RGN off-target sequence + PAM for EMX1
  source 1..21: mol_type = other DNA
gtactagcagaagaagaaagg

SEQ ID NO: 2346 - DNA, 21 bp, synthetic construct
  misc_feature 1..21: note = Description of Artificial Sequence: Synthetic potential truncated RGN off-target sequence + PAM for EMX1
  source 1..21: mol_type = other DNA
gtctgagcacaagaagaatgg

SEQ ID NO: 2347 - DNA, 21 bp, synthetic construct
  misc_feature 1..21: note = Description of Artificial Sequence: Synthetic potential truncated RGN off-target sequence + PAM for EMX1
  source 1..21: mol_type = other DNA
gtgctagcagaagaagaaggg

SEQ ID NO: 2348 - DNA, 21 bp, synthetic construct
  misc_feature 1..21: note = Description of Artificial Sequence: Synthetic potential truncated RGN off-target sequence + PAM for EMX1
  source 1..21: mol_type = other DNA
tacagagcagaagaagaatgg

SEQ ID NO: 2349 - DNA, 21 bp, synthetic construct
  misc_feature 1..21: note = Description of Artificial Sequence: Synthetic potential truncated RGN off-target sequence + PAM for EMX1
  source 1..21: mol_type = other DNA
tacggagcagaagaagaatgg

SEQ ID NO: 2350 - DNA, 21 bp, synthetic construct
  misc_feature 1..21: note = Description of Artificial Sequence: Synthetic potential truncated RGN off-target sequence + PAM for EMX1
  source 1..21: mol_type = other DNA
aacggagcagaagaagaaagg

SEQ ID NO: 2351 - DNA, 21 bp, synthetic construct
  misc_feature 1..21: note = Description of Artificial Sequence: Synthetic potential truncated RGN off-target sequence + PAM for EMX1
  source 1..21: mol_type = other DNA
gacacagcagaagaagaaggg

SEQ ID NO: 2352 - DNA, 21 bp, synthetic construct
  misc_feature 1..21: note = Description of Artificial Sequence: Synthetic potential truncated RGN off-target sequence + PAM for EMX1
  source 1..21: mol_type = other DNA
ctgcgatcagaagaagaaagg

SEQ ID NO: 2353 - DNA, 21 bp, synthetic construct
  misc_feature 1..21: note = Description of Artificial Sequence: Synthetic potential truncated RGN off-target sequence + PAM for EMX1
  source 1..21: mol_type = other DNA
gactgggcagaagaagaaggg

SEQ ID NO: 2354 - DNA, 21 bp, synthetic construct
  misc_feature 1..21: note = Description of Artificial Sequence: Synthetic potential truncated RGN off-target sequence + PAM for EMX1
  source 1..21: mol_type = other DNA
ttccctgcagaagaagaaagg

SEQ ID NO: 2355 - DNA, 21 bp, synthetic construct
  misc_feature 1..21: note = Description of Artificial Sequence: Synthetic potential truncated RGN off-target sequence + PAM for EMX1
  source 1..21: mol_type = other DNA
ttcctaccagaagaagaatgg

SEQ ID NO: 2356 - DNA, 21 bp, synthetic construct
  misc_feature 1..21: note = Description of Artificial Sequence: Synthetic potential truncated RGN off-target sequence + PAM for EMX1
  source 1..21: mol_type = other DNA
ctctgaggagaagaagaaagg

SEQ ID NO: 2357 - DNA, 21 bp, synthetic construct
  misc_feature 1..21: note = Description of Artificial Sequence: Synthetic potential truncated RGN off-target sequence + PAM for EMX1
  source 1..21: mol_type = other DNA
atccaatcagaagaagaaggg

SEQ ID NO: 2358 - DNA, 21 bp, synthetic construct
  misc_feature 1..21: note = Description of Artificial Sequence: Synthetic potential truncated RGN off-target sequence + PAM for EMX1
  source 1..21: mol_type = other DNA
gcccctgcagaagaagaacgg

SEQ ID NO: 2359 - DNA, 21 bp, synthetic construct
  misc_feature 1..21: note = Description of Artificial Sequence: Synthetic potential truncated RGN off-target sequence + PAM for EMX1
  source 1..21: mol_type = other DNA
atccaaccagaagaagaaagg

SEQ ID NO: 2360 - DNA, 21 bp, synthetic construct
  misc_feature 1..21: note = Description of Artificial Sequence: Synthetic potential truncated RGN off-target sequence + PAM for EMX1
  source 1..21: mol_type = other DNA
gactgagaagaagaagaaagg

SEQ ID NO: 2361 - DNA, 21 bp, synthetic construct
  misc_feature 1..21: note = Description of Artificial Sequence: Synthetic potential truncated RGN off-target sequence + PAM for EMX1
  source 1..21: mol_type = other DNA
gtgggatcagaagaagaaagg

SEQ ID NO: 2362 - DNA, 21 bp, synthetic construct
  misc_feature 1..21: note = Description of Artificial Sequence: Synthetic potential truncated RGN off-target sequence + PAM for EMX1
  source 1..21: mol_type = other DNA
gacagagaagaagaagaaagg

SEQ ID NO: 2363 - DNA, 21 bp, synthetic construct
  misc_feature 1..21: note = Description of Artificial Sequence: Synthetic potential truncated RGN off-target sequence + PAM for EMX1
  source 1..21: mol_type = other DNA
gtcatggcagaagaagaaagg

SEQ ID NO: 2364 - DNA, 21 bp, synthetic construct
  misc_feature 1..21: note = Description of Artificial Sequence: Synthetic potential truncated RGN off-target sequence + PAM for EMX1
  source 1..21: mol_type = other DNA
gttggagaagaagaagaaggg

SEQ ID NO: 2365 - DNA, 21 bp, synthetic construct
  misc_feature 1..21: note = Description of Artificial Sequence: Synthetic potential truncated RGN off-target sequence + PAM for EMX1
  source 1..21: mol_type = other DNA
gtaagagaagaagaagaaggg

SEQ ID NO: 2366 - DNA, 21 bp, synthetic construct
  misc_feature 1..21: note = Description of Artificial Sequence: Synthetic potential truncated RGN off-target sequence + PAM for EMX1
  source 1..21: mol_type = other DNA
ctcctagcaaaagaagaatgg

SEQ ID NO: 2367 - DNA, 21 bp, synthetic construct
  misc_feature 1..21: note = Description of Artificial Sequence: Synthetic potential truncated RGN off-target sequence + PAM for EMX1
  source 1..21: mol_type = other DNA
ttcagagcaggagaagaatgg

SEQ ID NO: 2368 - DNA, 21 bp, synthetic construct
  misc_feature 1..21: note = Description of Artificial Sequence: Synthetic potential truncated RGN off-target sequence + PAM for EMX1
  source 1..21: mol_type = other DNA
gttggagcaggagaagaaggg

SEQ ID NO: 2369 - DNA, 21 bp, synthetic construct
  misc_feature 1..21: note = Description of Artificial Sequence: Synthetic potential truncated RGN off-target sequence + PAM for EMX1
  source 1..21: mol_type = other DNA
gcctgagcagaaggagaaggg

SEQ ID NO: 2370 - DNA, 21 bp, synthetic construct
  misc_feature 1..21: note = Description of Artificial Sequence: Synthetic potential truncated RGN off-target sequence + PAM for EMX1
  source 1..21: mol_type = other DNA
gtctgaggacaagaagaatgg

SEQ ID NO: 2371 - DNA, 21 bp, synthetic construct
  misc_feature 1..21: note = Description of Artificial Sequence: Synthetic potential truncated RGN off-target sequence + PAM for EMX1
  source 1..21: mol_type = other DNA
gtccgggaaggagaagaaagg

SEQ ID NO: 2372 - DNA, 21 bp, synthetic construct
  misc_feature 1..21: note = Description of Artificial Sequence: Synthetic potential truncated RGN off-target sequence + PAM for EMX1
  source 1..21: mol_type = other DNA
ggccgagcagaagaaagacgg

SEQ ID NO: 2373 - DNA, 21 bp, synthetic construct
  misc_feature 1..21: note = Description of Artificial Sequence: Synthetic potential truncated RGN off-target sequence + PAM for EMX1
  source 1..21: mol_type = other DNA
gtcctagcaggagaagaagag

SEQ ID NO: 2374 - DNA, 21 bp, synthetic construct
  misc_feature 1..21: note = Description of Artificial Sequence: Synthetic potential truncated RGN off-target sequence for VEGFA
  source 1..21: mol_type = other DNA
gtggggggagtttgccccagg

SEQ ID NO: 2375 - DNA, 21 bp, synthetic construct
  misc_feature 1..21: note = Description of Artificial Sequence: Synthetic potential truncated RGN off-target sequence for VEGFA
  source 1..21: mol_type = other DNA
gtggggggtgtttgctcccgg

SEQ ID NO: 2376 - DNA, 21 bp, synthetic construct
  misc_feature 1..21: note = Description of Artificial Sequence: Synthetic potential truncated RGN off-target sequence for VEGFA
  source 1..21: mol_type = other DNA
gtgggtggagtttgctactgg

SEQ ID NO: 2377 - DNA, 21 bp, synthetic construct
  misc_feature 1..21: note = Description of Artificial Sequence: Synthetic potential truncated RGN off-target sequence for VEGFA
  source 1..21: mol_type = other DNA
gtgggtggagtttgctacagg

SEQ ID NO: 2378 - DNA, 21 bp, synthetic construct
  misc_feature 1..21: note = Description of Artificial Sequence: Synthetic potential truncated RGN off-target sequence for VEGFA
  source 1..21: mol_type = other DNA
gtgggtggcgtttgctccagg

SEQ ID NO: 2379 - DNA, 21 bp, synthetic construct
  misc_feature 1..21: note = Description of Artificial Sequence: Synthetic potential truncated RGN off-target sequence for VEGFA
  source 1..21: mol_type = other DNA
gtgtggggaatttgctccagg

SEQ ID NO: 2380 - DNA, 21 bp, synthetic construct
  misc_feature 1..21: note = Description of Artificial Sequence: Synthetic potential truncated RGN off-target sequence for VEGFA
  source 1..21: mol_type = other DNA
gtggggggagctttctcctgg

SEQ ID NO: 2381 - DNA, 21 bp, synthetic construct
  misc_feature 1..21: note = Description of Artificial Sequence: Synthetic potential truncated RGN off-target sequence for VEGFA
  source 1..21: mol_type = other DNA
gggggggcagtttgctcctgg

SEQ ID NO: 2382 - DNA, 20 bp, synthetic construct
  misc_feature 1..20: note = Description of Artificial Sequence: Synthetic potential truncated RGN off-target sequence for VEGFA
  source 1..20: mol_type = other DNA
gtgtgagtgtgtgcgtgtgg

SEQ ID NO: 2383 - DNA, 20 bp, synthetic construct
  misc_feature 1..20: note = Description of Artificial Sequence: Synthetic potential truncated RGN off-target sequence for VEGFA
  source 1..20: mol_type = other DNA
gtgtgagtgtgtgcgtgagg

SEQ ID NO: 2384 - DNA, 20 bp, synthetic construct
  misc_feature 1..20: note = Description of Artificial Sequence: Synthetic potential truncated RGN off-target sequence for VEGFA
  source 1..20: mol_type = other DNA
gagtgggtgtgtgcgtgggg

SEQ ID NO: 2385 - DNA, 20 bp, synthetic construct
  misc_feature 1..20: note = Description of Artificial Sequence: Synthetic potential truncated RGN off-target sequence for VEGFA
  source 1..20: mol_type = other DNA
gagtgactgtgtgcgtgtgg

SEQ ID NO: 2386 - DNA, 20 bp, synthetic construct
  misc_feature 1..20: note = Description of Artificial Sequence: Synthetic potential truncated RGN off-target sequence for VEGFA
  source 1..20: mol_type = other DNA
gagtgagtgtgtgggtgggg

SEQ ID NO: 2387 - DNA, 20 bp, synthetic construct
  misc_feature 1..20: note = Description of Artificial Sequence: Synthetic potential truncated RGN off-target sequence for VEGFA
  source 1..20: mol_type = other DNA
gtgtgagtgtgtgcgtgggg

SEQ ID NO: 2388 - DNA, 20 bp, synthetic construct
  misc_feature 1..20: note = Description of Artificial Sequence: Synthetic potential truncated RGN off-target sequence for VEGFA
  source 1..20: mol_type = other DNA
cagtgagtgtgtgcgtgtgg

SEQ ID NO: 2389 - DNA, 20 bp, synthetic construct
  misc_feature 1..20: note = Description of Artificial Sequence: Synthetic potential truncated RGN off-target sequence for VEGFA
  source 1..20: mol_type = other DNA
gtgtgagtgtgtgcgtgtgg

SEQ ID NO: 2390 - DNA, 20 bp, synthetic construct
  misc_feature 1..20: note = Description of Artificial Sequence: Synthetic potential truncated RGN off-target sequence for VEGFA
  source 1..20: mol_type = other DNA
gagtgtgtgtgtgcgtgtgg

SEQ ID NO: 2391 - DNA, 20 bp, synthetic construct
  misc_feature 1..20: note = Description of Artificial Sequence: Synthetic potential truncated RGN off-target sequence for VEGFA
  source 1..20: mol_type = other DNA
gagtgagtgtgtgtgtgtgg

SEQ ID NO: 2392 - DNA, 20 bp, synthetic construct
  misc_feature 1..20: note = Description of Artificial Sequence: Synthetic potential truncated RGN off-target sequence for VEGFA
  source 1..20: mol_type = other DNA
gagtgagtgtgtgtgtgtgg

SEQ ID NO: 2393 - DNA, 20 bp, synthetic construct
  misc_feature 1..20: note = Description of Artificial Sequence: Synthetic potential truncated RGN off-target sequence for VEGFA
  source 1..20: mol_type = other DNA
gagtgagtgtgtgtgtgggg

SEQ ID NO: 2394 - DNA, 20 bp, synthetic construct
  misc_feature 1..20: note = Description of Artificial Sequence: Synthetic potential truncated RGN off-target sequence for VEGFA
  source 1..20: mol_type = other DNA
gagtgagtgtgtgtgtgtgg

SEQ ID NO: 2395 - DNA, 20 bp, synthetic construct
  misc_feature 1..20: note = Description of Artificial Sequence: Synthetic potential truncated RGN off-target sequence for VEGFA
  source 1..20: mol_type = other DNA
gagtgagtgtgtgcgcgggg

SEQ ID NO: 2396 - DNA, 21 bp, synthetic construct
  misc_feature 1..21: note = Description of Artificial Sequence: Synthetic potential truncated RGN off-target sequence for EMX1
  source 1..21: mol_type = other DNA
gtcagaggagaagaagaaggg

SEQ ID NO: 2397 - DNA, 21 bp, synthetic construct
  misc_feature 1..21: note = Description of Artificial Sequence: Synthetic potential truncated RGN off-target sequence for EMX1
  source 1..21: mol_type = other DNA
gtcagaggagaagaagaaggg

SEQ ID NO: 2398 - DNA, 21 bp, synthetic construct
  misc_feature 1..21: note = Description of Artificial Sequence: Synthetic potential truncated RGN off-target sequence for EMX1
  source 1..21: mol_type = other DNA
gtctgagcacaagaagaatgg

SEQ ID NO: 2399 - DNA, 21 bp, synthetic construct
  misc_feature 1..21: note = Description of Artificial Sequence: Synthetic potential truncated RGN off-target sequence for EMX1
  source 1..21: mol_type = other DNA
gtctgagcagaagaagaatgg

SEQ ID NO: 2400 - DNA, 21 bp, synthetic construct
  misc_feature 1..21: note = Description of Artificial Sequence: Synthetic potential truncated RGN off-target sequence for EMX1
  source 1..21: mol_type = other DNA
gacagagcagaagaagaaggg

SEQ ID NO: 2401 - DNA, 21 bp, synthetic construct
  misc_feature 1..21: note = Description of Artificial Sequence: Synthetic potential truncated RGN off-target sequence for EMX1
  source 1..21: mol_type = other DNA
gtactagcagaagaagaaagg

SEQ ID NO: 2402 - DNA, 21 bp, synthetic construct
  misc_feature 1..21: note = Description of Artificial Sequence: Synthetic potential truncated RGN off-target sequence for EMX1
  source 1..21: mol_type = other DNA
gtgggagcagaagaagaaggg

SEQ ID NO: 2403 - DNA, 21 bp, synthetic construct
  misc_feature 1..21: note = Description of Artificial Sequence: Synthetic potential truncated RGN off-target sequence for EMX1
  source 1..21: mol_type = other DNA
gtcccagcagtagaagaatgg

SEQ ID NO: 2404 - RNA, 31 nt, synthetic construct
  misc_feature 1..31: note = Description of Artificial Sequence: Synthetic guide RNA sequence
  misc_difference 1..19: note = a, c, u, g, unknown or other
  misc_difference 1..19: note = This region may encompass 17-18 or 17-19 nucleotides
  source 1..31: mol_type = other RNA
nnnnnnnnnnnnnnnnnnngttttagagcta

SEQ ID NO: 2405 - RNA, 60 nt, synthetic construct
  misc_feature 1..60: note = Description of Artificial Sequence: Synthetic tracrRNA sequence
  source 1..60: mol_type = other RNA
tagcaagttaaaataaggctagtccgttatcaacttgaaaaagtggcaccgagtcggtgc

SEQ ID NO: 2406 - RNA, 64 nt, synthetic construct
  misc_feature 1..64: note = Description of Artificial Sequence: Synthetic tracrRNA sequence
  source 1..64: mol_type = other RNA
agcatagcaagttaaaataaggctagtccgttatcaacttgaaaaagtggcaccgagtcggtgc

SEQ ID NO: 2407 - RNA, 41 nt, synthetic construct
  misc_feature 1..41: note = Description of Artificial Sequence: Synthetic guide RNA sequence
  misc_difference 1..19: note = a, c, u, g, unknown or other
  misc_difference 1..19: note = This region may encompass 17-18 or 17-19 nucleotides
  source 1..41: mol_type = other RNA
nnnnnnnnnnnnnnnnnnngttttagagctatgctgttttg

SEQ ID NO: 2408 - RNA, 35 nt, synthetic construct
  misc_feature 1..35: note = Description of Artificial Sequence: Synthetic guide RNA sequence
  misc_difference 1..19: note = a, c, u, g, unknown or other
  misc_difference 1..19: note = This region may encompass 17-18 or 17-19 nucleotides
  source 1..35: mol_type = other RNA
nnnnnnnnnnnnnnnnnnngttttagagctatgct

SEQ ID NO: 2409 - RNA, 70 nt, synthetic construct
  misc_feature 1..70: note = Description of Artificial Sequence: Synthetic tracrRNA sequence
  source 1..70: mol_type = other RNA
caaaacagcatagcaagttaaaataaggctagtccgttatcaacttgaaaaagtggcaccgagtcggtgc

SEQ ID NO: 2410 - RNA, 45 nt, synthetic construct
  misc_feature 1..45: note = Description of Artificial Sequence: Synthetic tracrRNA sequence
  source 1..45: mol_type = other RNA
tagcaagttaaaataaggctagtccgttatcaacttgaaaaagtg

SEQ ID NO: 2411 - RNA, 32 nt, synthetic construct
  misc_feature 1..32: note = Description of Artificial Sequence: Synthetic tracrRNA sequence
  source 1..32: mol_type = other RNA
tagcaagttaaaataaggctagtccgttatca

SEQ ID NO: 2412 - RNA, 26 nt, synthetic construct
  misc_feature 1..26: note = Description of Artificial Sequence: Synthetic tracrRNA sequence
  source 1..26: mol_type = other RNA
tagcaagttaaaataaggctagtccg

SEQ ID NO: 2413 - DNA, 20 bp, synthetic construct
  misc_feature 1..20: note = Description of Artificial Sequence: Synthetic EGFP target site sequence
  source 1..20: mol_type = other DNA
gggcacgggcagcttgccgg

SEQ ID NO: 2414 - DNA, 20 bp, synthetic construct
  misc_feature 1..20: note = Description of Artificial Sequence: Synthetic EGFP target site sequence
  source 1..20: mol_type = other DNA
gggcacgggcagcttgccgc

SEQ ID NO: 2415 - DNA, 20 bp, synthetic construct
  misc_feature 1..20: note = Description of Artificial Sequence: Synthetic EGFP target site sequence
  source 1..20: mol_type = other DNA
gggcacgggcagcttgcccg

SEQ ID NO: 2416 - DNA, 20 bp, synthetic construct
  misc_feature 1..20: note = Description of Artificial Sequence: Synthetic EGFP target site sequence
  source 1..20: mol_type = other DNA
gggcacgggcagcttgcggg

SEQ ID NO: 2417 - DNA, 20 bp, synthetic construct
  misc_feature 1..20: note = Description of Artificial Sequence: Synthetic EGFP target site sequence
  source 1..20: mol_type = other DNA
gggcacgggcagcttggcgg

SEQ ID NO: 2418 - DNA, 20 bp, synthetic construct
  misc_feature 1..20: note = Description of Artificial Sequence: Synthetic EGFP target site sequence
  source 1..20: mol_type = other DNA
gggcacgggcagcttcccgg

SEQ ID NO: 2419 - DNA, 20 bp, synthetic construct
  misc_feature 1..20: note = Description of Artificial Sequence: Synthetic EGFP target site sequence
  source 1..20: mol_type = other DNA
gggcacgggcagctagccgg

SEQ ID NO: 2420 - DNA, 20 bp, synthetic construct
  misc_feature 1..20: note = Description of Artificial Sequence: Synthetic EGFP target site sequence
  source 1..20: mol_type = other DNA
gggcacgggcagcatgccgg

SEQ ID NO: 2421 - DNA, 20 bp, synthetic construct
  misc_feature 1..20: note = Description of Artificial Sequence: Synthetic EGFP target site sequence
  source 1..20: mol_type = other DNA
gggcacgggcaggttgccgg

SEQ ID NO: 2422 - DNA, 20 bp, synthetic construct
  misc_feature 1..20: note = Description of Artificial Sequence: Synthetic EGFP target site sequence
  source 1..20: mol_type = other DNA
gggcacgggcaccttgccgg

SEQ ID NO: 2423 - DNA, 20 bp, synthetic construct
  misc_feature 1..20: note = Description of Artificial Sequence: Synthetic EGFP target site sequence
  source 1..20: mol_type = other DNA
gggcacgggctgcttgccgg

SEQ ID NO: 2424 - DNA, 20 bp, synthetic construct
  misc_feature 1..20: note = Description of Artificial Sequence: Synthetic EGFP target site sequence
  source 1..20: mol_type = other DNA
gggcacggggagcttgccgg

SEQ ID NO: 2425 - DNA, 20 bp, synthetic construct
  misc_feature 1..20: note = Description of Artificial Sequence: Synthetic EGFP target site sequence
  source 1..20: mol_type = other DNA
gggcacggccagcttgccgg

SEQ ID NO: 2426 - DNA, 20 bp, synthetic construct
  misc_feature 1..20: note = Description of Artificial Sequence: Synthetic EGFP target site sequence
  source 1..20: mol_type = other DNA
gggcacgcgcagcttgccgg

SEQ ID NO: 2427 - DNA, 20 bp, synthetic construct
  misc_feature 1..20: note = Description of Artificial Sequence: Synthetic EGFP target site sequence
  source 1..20: mol_type = other DNA
gggcaccggcagcttgccgg

SEQ ID NO: 2428 - DNA, 20 bp, synthetic construct
  misc_feature 1..20: note = Description of Artificial Sequence: Synthetic EGFP target site sequence
  source 1..20: mol_type = other DNA
gggcaggggcagcttgccgg

SEQ ID NO: 2429 - DNA, 20 bp, synthetic construct
  misc_feature 1..20: note = Description of Artificial Sequence: Synthetic EGFP target site sequence
  source 1..20: mol_type = other DNA
gggctcgggcagcttgccgg

SEQ ID NO: 2430 - DNA, 20 bp, synthetic construct
  misc_feature 1..20: note = Description of Artificial Sequence: Synthetic EGFP target site sequence
  source 1..20: mol_type = other DNA
ggggacgggcagcttgccgg

SEQ ID NO: 2431 - DNA, 20 bp, synthetic construct
  misc_feature 1..20: note = Description of Artificial Sequence: Synthetic EGFP target site sequence
  source 1..20: mol_type = other DNA
ggccacgggcagcttgccgg

SEQ ID NO: 2432 - DNA, 20 bp, synthetic construct
  misc_feature 1..20: note = Description of Artificial Sequence: Synthetic EGFP target site sequence
  source 1..20: mol_type = other DNA
gcgcacgggcagcttgccgg

SEQ ID NO: 2433 - DNA, 20 bp, synthetic construct
  misc_feature 1..20: note = Description of Artificial Sequence: Synthetic EGFP target site sequence
  source 1..20: mol_type = other DNA
gggcacgggcagcttgcccc

SEQ ID NO: 2434 - DNA, 20 bp, synthetic construct
  misc_feature 1..20: note = Description of Artificial Sequence: Synthetic EGFP target site sequence
  source 1..20: mol_type = other DNA
gggcacgggcagcttggggg

SEQ ID NO: 2435 - DNA, 20 bp, synthetic construct
  misc_feature 1..20: note = Description of Artificial Sequence: Synthetic EGFP target site sequence
  source 1..20: mol_type = other DNA
gggcacgggcagctacccgg

SEQ ID NO: 2436 - DNA, 20 bp, synthetic construct
  misc_feature 1..20: note = Description of Artificial Sequence: Synthetic EGFP target site sequence
  source 1..20: mol_type = other DNA
gggcacgggcaggatgccgg

SEQ ID NO: 2437 - DNA, 20 bp, synthetic construct
  misc_feature 1..20: note = Description of Artificial Sequence: Synthetic EGFP target site sequence
  source 1..20: mol_type = other DNA
gggcacgggctccttgccgg

SEQ ID NO: 2438 - DNA, 20 bp, synthetic construct
  misc_feature 1..20: note = Description of Artificial Sequence: Synthetic EGFP target site sequence
  source 1..20: mol_type = other DNA
gggcacggcgagcttgccgg

SEQ ID NO: 2439 - DNA, 20 bp, synthetic construct
  misc_feature 1..20: note = Description of Artificial Sequence: Synthetic EGFP target site sequence
  source 1..20: mol_type = other DNA
gggcacccgcagcttgccgg

SEQ ID NO: 2440 - DNA, 20 bp, synthetic construct
  misc_feature 1..20: note = Description of Artificial Sequence: Synthetic EGFP target site sequence
  source 1..20: mol_type = other DNA
gggctggggcagcttgccgg

SEQ ID NO: 2441 - DNA, 20 bp, synthetic construct
  misc_feature 1..20: note = Description of Artificial Sequence: Synthetic EGFP target site sequence
  source 1..20: mol_type = other DNA
ggcgacgggcagcttgccgg

SEQ ID NO: 2442 - DNA, 20 bp, synthetic construct
  misc_feature 1..20: note = Description of Artificial Sequence: Synthetic EGFP target site sequence
  source 1..20: mol_type = other DNA
gcccacgggcagcttgccgg

SEQ ID NO: 2443 - DNA, 20 bp, synthetic construct
  misc_feature 1..20: note = Description of Artificial Sequence: Synthetic EGFP target site sequence
  source 1..20: mol_type = other DNA
gccgacgggcagcttgccgg

SEQ ID NO: 2444 - DNA, 20 bp, synthetic construct
  misc_feature 1..20: note = Description of Artificial Sequence: Synthetic EGFP target site sequence
  source 1..20: mol_type = other DNA
gccgtcgggcagcttgccgg

SEQ ID NO: 2445 - DNA, 20 bp, synthetic construct
  misc_feature 1..20: note = Description of Artificial Sequence: Synthetic EGFP target site sequence
  source 1..20: mol_type = other DNA
gccgtggggcagcttgccgg

SEQ ID NO: 2446 - DNA, 20 bp, synthetic construct
  misc_feature 1..20: note = Description of Artificial Sequence: Synthetic EGFP target site sequence
  source 1..20: mol_type = other DNA
gccgtgcggcagcttgccgg

SEQ ID NO: 2447 - DNA, 20 bp, synthetic construct
  misc_feature 1..20: note = Description of Artificial Sequence: Synthetic EGFP target site sequence
  source 1..20: mol_type = other DNA
gccgtgccgcagcttgccgg

SEQ ID NO: 2448 - DNA, 20 bp, synthetic construct
  misc_feature 1..20: note = Description of Artificial Sequence: Synthetic EGFP target site sequence
  source 1..20: mol_type = other DNA
gccgtgccccagcttgccgg

SEQ ID NO: 2449 - DNA, 20 bp, synthetic construct
  misc_feature 1..20: note = Description of Artificial Sequence: Synthetic EGFP target site sequence
  source 1..20: mol_type = other DNA
gccgtgcccgagcttgccgg

SEQ ID NO: 2450 - DNA, 20 bp, synthetic construct
  misc_feature 1..20: note = Description of Artificial Sequence: Synthetic EGFP target site sequence
  source 1..20: mol_type = other DNA
gggcacgggcagcttgcggc

SEQ ID NO: 2451 - DNA, 20 bp, synthetic construct
  misc_feature 1..20: note = Description of Artificial Sequence: Synthetic EGFP target site sequence
  source 1..20: mol_type = other DNA
gggcacgggcagcttccggg

SEQ ID NO: 2452 - DNA, 20 bp, synthetic construct
  misc_feature 1..20: note = Description of Artificial Sequence: Synthetic EGFP target site sequence
  source 1..20: mol_type = other DNA
gggcacgggcagcatgcggg

SEQ ID NO: 2453 - DNA, 20 bp, synthetic construct
  misc_feature 1..20: note = Description of Artificial Sequence: Synthetic EGFP target site sequence
  source 1..20: mol_type = other DNA
gggcacgggcaccttgcggg

SEQ ID NO: 2454 - DNA, 20 bp, synthetic construct
  misc_feature 1..20: note = Description of Artificial Sequence: Synthetic EGFP target site sequence
  source 1..20: mol_type = other DNA
gggcacggggagcttgcggg

SEQ ID NO: 2455 - DNA, 20 bp, synthetic construct
  misc_feature 1..20: note = Description of Artificial Sequence: Synthetic EGFP target site sequence
  source 1..20: mol_type = other DNA
gggcacgcgcagcttgcggg

SEQ ID NO: 2456 - DNA, 20 bp, synthetic construct
  misc_feature 1..20: note = Description of Artificial Sequence: Synthetic EGFP target site sequence
  source 1..20: mol_type = other DNA
gggcaggggcagcttgcggg

SEQ ID NO: 2457 - DNA, 20 bp, synthetic construct
  misc_feature 1..20: note = Description of Artificial Sequence: Synthetic EGFP target site sequence
  source 1..20: mol_type = other DNA
ggggacgggcagcttgcggg

SEQ ID NO: 2458 - DNA, 20 bp, synthetic construct
  misc_feature 1..20: note = Description of Artificial Sequence: Synthetic EGFP target site sequence
  source 1..20: mol_type = other DNA
gcgcacgggcagcttgcggg

SEQ ID NO: 2459 - DNA, 20 bp, synthetic construct
  misc_feature 1..20: note = Description of Artificial Sequence: Synthetic EGFP target site sequence
  source 1..20: mol_type = other DNA
gggcacggggagcttgccgc

SEQ ID NO: 2460 - DNA, 20 bp, synthetic construct
  misc_feature 1..20: note = Description of Artificial Sequence: Synthetic EGFP target site sequence
  source 1..20: mol_type = other DNA
gggcacggggagcttcccgg

SEQ ID NO: 2461 - DNA, 20 bp, synthetic construct
  misc_feature 1..20: note = Description of Artificial Sequence: Synthetic EGFP target site sequence
  source 1..20: mol_type = other DNA
gggcacggggagcatgccgg

SEQ ID NO: 2462 - DNA, 20 bp, synthetic construct
  misc_feature 1..20: note = Description of Artificial Sequence: Synthetic EGFP target site sequence
  source 1..20: mol_type = other DNA
gggcacggggaccttgccgg

SEQ ID NO: 2463 - DNA, 20 bp, synthetic construct
  misc_feature 1..20: note = Description of Artificial Sequence: Synthetic EGFP target site sequence
  source 1..20: mol_type = other DNA
gggcacgcggagcttgccgg

SEQ ID NO: 2464 - DNA, 20 bp, synthetic construct
  misc_feature 1..20: note = Description of Artificial Sequence: Synthetic EGFP target site sequence
  source 1..20: mol_type = other DNA
gggcagggggagcttgccgg

SEQ ID NO: 2465 - DNA, 20 bp, synthetic construct
  misc_feature 1..20: note = Description of Artificial Sequence: Synthetic EGFP target site sequence
  source 1..20: mol_type = other DNA
ggggacggggagcttgccgg

SEQ ID NO: 2466 - DNA, 20 bp, synthetic construct
  misc_feature 1..20: note = Description of Artificial Sequence: Synthetic EGFP target site sequence
  source 1..20: mol_type = other DNA
gcgcacggggagcttgccgg

SEQ ID NO: 2467 - DNA, 20 bp, synthetic construct
  misc_feature 1..20: note = Description of Artificial Sequence: Synthetic EGFP target site sequence
  source 1..20: mol_type = other DNA
gcgcacgggcagcttgccgc

SEQ ID NO: 2468 - DNA, 20 bp, synthetic construct
  misc_feature 1..20: note = Description of Artificial Sequence: Synthetic EGFP target site sequence
  source 1..20: mol_type = other DNA
gcgcacgggcagcttcccgg

SEQ ID NO: 2469 - DNA, 20 bp, synthetic construct
  misc_feature 1..20: note = Description of Artificial Sequence: Synthetic EGFP target site sequence
  source 1..20: mol_type = other DNA
gcgcacgggcagcatgccgg

SEQ ID NO: 2470 - DNA, 20 bp, synthetic construct
  misc_feature 1..20: note = Description of Artificial Sequence: Synthetic EGFP target site sequence
  source 1..20: mol_type = other DNA
gcgcacgggcaccttgccgg

SEQ ID NO: 2471 - DNA, 20 bp, synthetic construct
  misc_feature 1..20: note = Description of Artificial Sequence: Synthetic EGFP target site sequence
  source 1..20: mol_type = other DNA
gcgcacgcgcagcttgccgg

SEQ ID NO: 2472 - DNA, 20 bp, synthetic construct
  misc_feature 1..20: note = Description of Artificial Sequence: Synthetic EGFP target site sequence
  source 1..20: mol_type = other DNA
gcgcaggggcagcttgccgg

SEQ ID NO: 2473 - DNA, 20 bp, synthetic construct
  misc_feature 1..20: note = Description of Artificial Sequence: Synthetic EGFP target site sequence
  source 1..20: mol_type = other DNA
gcggacgggcagcttgccgg

SEQ ID NO: 2474 - DNA, 20 bp, synthetic construct
  misc_feature 1..20: note = Description of Artificial Sequence: Synthetic EGFP target site sequence
  source 1..20: mol_type = other DNA
gatgccgttcttctgcttgt

SEQ ID NO: 2475 - DNA, 20 bp, synthetic construct
  misc_feature 1..20: note = Description of Artificial Sequence: Synthetic EGFP target site sequence
  source 1..20: mol_type = other DNA
gatgccgttcttctgcttga

SEQ ID NO: 2476 - DNA, 20 bp, synthetic construct
  misc_feature 1..20: note = Description of Artificial Sequence: Synthetic EGFP target site sequence
  source 1..20: mol_type = other DNA
gatgccgttcttctgcttct

SEQ ID NO: 2477 - DNA, 20 bp, synthetic construct
  misc_feature 1..20: note = Description of Artificial Sequence: Synthetic EGFP target site sequence
  source 1..20: mol_type = other DNA
gatgccgttcttctgctagt

SEQ ID NO: 2478 - DNA, 20 bp, synthetic construct
  misc_feature 1..20: note = Description of Artificial Sequence: Synthetic EGFP target site sequence
  source 1..20: mol_type = other DNA
gatgccgttcttctgcatgt

SEQ ID NO: 2479 - DNA, 20 bp, synthetic construct
  misc_feature 1..20: note = Description of Artificial Sequence: Synthetic EGFP target site sequence
  source 1..20: mol_type = other DNA
gatgccgttcttctggttgt

SEQ ID NO: 2480 - DNA, 20 bp, synthetic construct
  misc_feature 1..20: note = Description of Artificial Sequence: Synthetic EGFP target site sequence
  source 1..20: mol_type = other DNA
gatgccgttcttctccttgt

SEQ ID NO: 2481 - DNA, 20 bp, synthetic construct
  misc_feature 1..20: note = Description of Artificial Sequence: Synthetic EGFP target site sequence
  source 1..20: mol_type = other DNA
gatgccgttcttcagcttgt

SEQ ID NO: 2482 - DNA, 20 bp, synthetic construct
  misc_feature 1..20: note = Description of Artificial Sequence: Synthetic EGFP target site sequence
  source 1..20: mol_type = other DNA
gatgccgttcttgtgcttgt

SEQ ID NO: 2483 - DNA, 20 bp, synthetic construct
  misc_feature 1..20: note = Description of Artificial Sequence: Synthetic EGFP target site sequence
  source 1..20: mol_type = other DNA
gatgccgttctactgcttgt

SEQ ID NO: 2484 - DNA, 20 bp, synthetic construct
  misc_feature 1..20: note = Description of Artificial Sequence: Synthetic EGFP target site sequence
  source 1..20: mol_type = other DNA
gatgccgttcatctgcttgt

SEQ ID NO: 2485 - DNA, 20 bp, synthetic construct
  misc_feature 1..20: note = Description of Artificial Sequence: Synthetic EGFP target site sequence
  source 1..20: mol_type = other DNA
gatgccgttgttctgcttgt

SEQ ID NO: 2486 - DNA, 20 bp, synthetic construct
  misc_feature 1..20: note = Description of Artificial Sequence: Synthetic EGFP target site sequence
  source 1..20: mol_type = other DNA
gatgccgtacttctgcttgt

SEQ ID NO: 2487 - DNA, 20 bp, synthetic construct
  misc_feature 1..20: note = Description of Artificial Sequence: Synthetic EGFP target site sequence
  source 1..20: mol_type = other DNA
gatgccgatcttctgcttgt

SEQ ID NO: 2488 - DNA, 20 bp, synthetic construct
  misc_feature 1..20: note = Description of Artificial Sequence: Synthetic EGFP target site sequence
  source 1..20: mol_type = other DNA
gatgcccttcttctgcttgt

SEQ ID NO: 2489 - DNA, 20 bp, synthetic construct
  misc_feature 1..20: note = Description of Artificial Sequence: Synthetic EGFP target site sequence
  source 1..20: mol_type = other DNA
gatgcggttcttctgcttgt

SEQ ID NO: 2490 - DNA, 20 bp, synthetic construct
  misc_feature 1..20: note = Description of Artificial Sequence: Synthetic EGFP target site sequence
  source 1..20: mol_type = other DNA
gatggcgttcttctgcttgt

SEQ ID NO: 2491 - DNA, 20 bp, synthetic construct
  misc_feature 1..20: note = Description of Artificial Sequence: Synthetic EGFP target site sequence
  source 1..20: mol_type = other DNA
gatcccgttcttctgcttgt

SEQ ID NO: 2492 - DNA, 20 bp, synthetic construct
  misc_feature 1..20: note = Description of Artificial Sequence: Synthetic EGFP target site sequence
  source 1..20: mol_type = other DNA
gatgccgttcttctgcttgt

SEQ ID NO: 2493 - DNA, 20 bp, synthetic construct
  misc_feature 1..20: note = Description of Artificial Sequence: Synthetic EGFP target site sequence
  source 1..20: mol_type = other DNA
gatgccgttcttctgcttgt

SEQ ID NO: 2494 - DNA, 20 bp, synthetic construct
  misc_feature 1..20: note = Description of Artificial Sequence: Synthetic EGFP target site sequence
  source 1..20: mol_type = other DNA
gatgccgttcttctgcttca

SEQ ID NO: 2495 - DNA, 20 bp, synthetic construct
  misc_feature 1..20: note = Description of Artificial Sequence: Synthetic EGFP target site sequence
  source 1..20: mol_type = other DNA
gatgccgttcttctgcaagt

SEQ ID NO: 2496 - DNA, 20 bp, synthetic construct
  misc_feature 1..20: note = Description of Artificial Sequence: Synthetic EGFP target site sequence
  source 1..20: mol_type = other DNA
gatgccgttcttctcgttgt

SEQ ID NO: 2497 - DNA, 20 bp, synthetic construct
  misc_feature 1..20: note = Description of Artificial Sequence: Synthetic EGFP target site sequence
  source 1..20: mol_type = other DNA
gatgccgttcttgagcttgt

SEQ ID NO: 2498 - DNA, 20 bp, synthetic construct
  misc_feature 1..20: note = Description of Artificial Sequence: Synthetic EGFP target site sequence
  source 1..20: mol_type = other DNA
gatgccgttcaactgcttgt

SEQ ID NO: 2499 - DNA, 20 bp, synthetic construct
  misc_feature 1..20: note = Description of Artificial Sequence: Synthetic EGFP target site sequence
  source 1..20: mol_type = other DNA
gatgccgtagttctgcttgt

SEQ ID NO: 2500 - DNA, 20 bp, synthetic construct
  misc_feature 1..20: note = Description of Artificial Sequence: Synthetic EGFP target site sequence
  source 1..20: mol_type = other DNA
gatgcccatcttctgcttgt

SEQ ID NO: 2501 - DNA, 20 bp, synthetic construct
  misc_feature 1..20: note = Description of Artificial Sequence: Synthetic EGFP target site sequence
  source 1..20: mol_type = other DNA
gatggggttcttctgcttgt

SEQ ID NO: 2502 - DNA, 20 bp, synthetic construct
  misc_feature 1..20: note = Description of Artificial Sequence: Synthetic EGFP target site sequence
  source 1..20: mol_type = other DNA
gaacccgttcttctgcttgt

SEQ ID NO: 2503 - DNA, 20 bp, synthetic construct
  misc_feature 1..20: note = Description of Artificial Sequence: Synthetic EGFP target site sequence
  source 1..20: mol_type = other DNA
gtagccgttcttctgcttgt

SEQ ID NO: 2504 - DNA, 20 bp, synthetic construct
  misc_feature 1..20: note = Description of Artificial Sequence: Synthetic EGFP target site sequence
  source 1..20: mol_type = other DNA
gtacccgttcttctgcttgt

SEQ ID NO: 2505 - DNA, 20 bp, synthetic construct
  misc_feature 1..20: note = Description of Artificial Sequence: Synthetic EGFP target site sequence
  source 1..20: mol_type = other DNA
gtacgcgttcttctgcttgt

SEQ ID NO: 2506 - DNA, 20 bp, synthetic construct
  misc_feature 1..20: note = Description of Artificial Sequence: Synthetic EGFP target site sequence
  source 1..20: mol_type = other DNA
gtacgggttcttctgcttgt

SEQ ID NO: 2507 - DNA, 20 bp, synthetic construct
  misc_feature 1..20: note = Description of Artificial Sequence: Synthetic EGFP target site sequence
  source 1..20: mol_type = other DNA
gtacggcttcttctgcttgt

SEQ ID NO: 2508 - DNA, 20 bp, synthetic construct
  misc_feature 1..20: note = Description of Artificial Sequence: Synthetic EGFP target site sequence
  source 1..20: mol_type = other DNA
gtacggcatcttctgcttgt

SEQ ID NO: 2509 - DNA, 20 bp, synthetic construct
  misc_feature 1..20: note = Description of Artificial Sequence: Synthetic EGFP target site sequence
  source 1..20: mol_type = other DNA
gtacggcaacttctgcttgt

SEQ ID NO: 2510 - DNA, 20 bp, synthetic construct
  misc_feature 1..20: note = Description of Artificial Sequence: Synthetic EGFP target site sequence
  source 1..20: mol_type = other DNA
gtacggcaagttctgcttgt

SEQ ID NO: 2511 - DNA, 20 bp, synthetic construct
  misc_feature 1..20: note = Description of Artificial Sequence: Synthetic EGFP target site sequence
  source 1..20: mol_type = other DNA
gatgccgttcttctgctaga

SEQ ID NO: 2512 - DNA, 20 bp, synthetic construct
  misc_feature 1..20: note = Description of Artificial Sequence: Synthetic EGFP target site sequence
  source 1..20: mol_type = other DNA
gatgccgttcttctggtagt

SEQ ID NO: 2513 - DNA, 20 bp, synthetic construct
  misc_feature 1..20: note = Description of Artificial Sequence: Synthetic EGFP target site sequence
  source 1..20: mol_type = other DNA
gatgccgttcttcagctagt

SEQ ID NO: 2514 - DNA, 20 bp, synthetic construct
  misc_feature 1..20: note = Description of Artificial Sequence: Synthetic EGFP target site sequence
  source 1..20: mol_type = other DNA
gatgccgttctactgctagt

SEQ ID NO: 2515 - DNA, 20 bp, synthetic construct
  misc_feature 1..20: note = Description of Artificial Sequence: Synthetic EGFP target site sequence
  source 1..20: mol_type = other DNA
gatgccgttgttctgctagt

SEQ ID NO: 2516 - DNA, 20 bp, synthetic construct
  misc_feature 1..20: note = Description of Artificial Sequence: Synthetic EGFP target site sequence
  source 1..20: mol_type = other DNA
gatgccgatcttctgctagt

SEQ ID NO: 2517 - DNA, 20 bp, synthetic construct
  misc_feature 1..20: note = Description of Artificial Sequence: Synthetic EGFP target site sequence
  source 1..20: mol_type = other DNA
gatgcggttcttctgctagt

SEQ ID NO: 2518 - DNA, 20 bp, synthetic construct
  misc_feature 1..20: note = Description of Artificial Sequence: Synthetic EGFP target site sequence
  source 1..20: mol_type = other DNA
gatcccgttcttctgctagt

SEQ ID NO: 2519 - DNA, 20 bp, synthetic construct
  misc_feature 1..20: note = Description of Artificial Sequence: Synthetic EGFP target site sequence
  source 1..20: mol_type = other DNA
gttgccgttcttctgctagt

SEQ ID NO: 2520 - DNA, 20 bp, synthetic construct
  misc_feature 1..20: note = Description of Artificial Sequence: Synthetic EGFP target site sequence
  source 1..20: mol_type = other DNA
gatgccgttgttctgcttga

SEQ ID NO: 2521 - DNA, 20 bp, synthetic construct
  misc_feature 1..20: note = Description of Artificial Sequence: Synthetic EGFP target site sequence
  source 1..20: mol_type = other DNA
gatgccgttgttctggttgt

SEQ ID NO: 2522 - DNA, 20 bp, synthetic construct
  misc_feature 1..20: note = Description of Artificial Sequence: Synthetic EGFP target site sequence
  source 1..20: mol_type = other DNA
gatgccgttgttcagcttgt

SEQ ID NO: 2523 - DNA, 20 bp, synthetic construct
  misc_feature 1..20: note = Description of Artificial Sequence: Synthetic EGFP target site sequence
  source 1..20: mol_type = other DNA
gatgccgttgtactgcttgt

SEQ ID NO: 2524 - DNA, 20 bp, synthetic construct
  misc_feature 1..20: note = Description of Artificial Sequence: Synthetic EGFP target site sequence
  source 1..20: mol_type = other DNA
gatgccgatgttctgcttgt

SEQ ID NO: 2525 - DNA, 20 bp, synthetic construct
  misc_feature 1..20: note = Description of Artificial Sequence: Synthetic EGFP target site sequence
  source 1..20: mol_type = other DNA
gatgcggttgttctgcttgt

SEQ ID NO: 2526 - DNA, 20 bp, synthetic construct
  misc_feature 1..20: note = Description of Artificial Sequence: Synthetic EGFP target site sequence
  source 1..20: mol_type = other DNA
gatcccgttgttctgcttgt

SEQ ID NO: 2527 - DNA, 20 bp, synthetic construct
  misc_feature 1..20: note = Description of Artificial Sequence: Synthetic EGFP target site sequence
  source 1..20: mol_type = other DNA
gttgccgttgttctgcttgt

SEQ ID NO: 2528 - DNA, 20 bp, synthetic construct
  misc_feature 1..20: note = Description of Artificial Sequence: Synthetic EGFP target site sequence
  source 1..20: mol_type = other DNA
gttgccgttcttctgcttga

SEQ ID NO: 2529 - DNA, 20 bp, synthetic construct
  misc_feature 1..20: note = Description of Artificial Sequence: Synthetic EGFP target site sequence
  source 1..20: mol_type = other DNA
gttgccgttcttctggttgt

SEQ ID NO: 2530 - DNA, 20 bp, synthetic construct
  misc_feature 1..20: note = Description of Artificial Sequence: Synthetic EGFP target site sequence
  source 1..20: mol_type = other DNA
gttgccgttcttcagcttgt

SEQ ID NO: 2531 - DNA, 20 bp, synthetic construct
  misc_feature 1..20: note = Description of Artificial Sequence: Synthetic EGFP target site sequence
  source 1..20: mol_type = other DNA
gttgccgttctactgcttgt

SEQ ID NO: 2532 - DNA, 20 bp, synthetic construct
  misc_feature 1..20: note = Description of Artificial Sequence: Synthetic EGFP target site sequence
  source 1..20: mol_type = other DNA
gttgccgatcttctgcttgt

SEQ ID NO: 2533 - DNA, 20 bp, synthetic construct
  misc_feature 1..20: note = Description of Artificial Sequence: Synthetic EGFP target site sequence
  source 1..20: mol_type = other DNA
gttgcggttcttctgcttgt

SEQ ID NO: 2534 - DNA, 20 bp, synthetic construct
  misc_feature 1..20: note = Description of Artificial Sequence: Synthetic EGFP target site sequence
  source 1..20: mol_type = other DNA
gttcccgttcttctgcttgt

SEQ ID NO: 2535 - DNA, 20 bp, synthetic construct
  misc_feature 1..20: note = Description of Artificial Sequence: Synthetic EGFP target site sequence
  source 1..20: mol_type = other DNA
ggtggtgcagatgaacttca

SEQ ID NO: 2536 - DNA, 20 bp, synthetic construct
  misc_feature 1..20: note = Description of Artificial Sequence: Synthetic EGFP target site sequence
  source 1..20: mol_type = other DNA
ggtggtgcagatgaacttct

SEQ ID NO: 2537 - DNA, 20 bp, synthetic construct
  misc_feature 1..20: note = Description of Artificial Sequence: Synthetic EGFP target site sequence
  source 1..20: mol_type = other DNA
ggtggtgcagatgaacttga

SEQ ID NO: 2538 - DNA, 20 bp, synthetic construct
  misc_feature 1..20: note = Description of Artificial Sequence: Synthetic EGFP target site sequence
  source 1..20: mol_type = other DNA
ggtggtgcagatgaactaca

SEQ ID NO: 2539 - DNA, 20 bp, synthetic construct
  misc_feature 1..20: note = Description of Artificial Sequence: Synthetic EGFP target site sequence
  source 1..20: mol_type = other DNA
ggtggtgcagatgaacatca

SEQ ID NO: 2540 - DNA, 20 bp, synthetic construct
  misc_feature 1..20: note = Description of Artificial Sequence: Synthetic EGFP target site sequence
  source 1..20: mol_type = other DNA
ggtggtgcagatgaagttca

SEQ ID NO: 2541 - DNA, 20 bp, synthetic construct
  misc_feature 1..20: note = Description of Artificial Sequence: Synthetic EGFP target site sequence
  source 1..20: mol_type = other DNA
ggtggtgcagatgatcttca

SEQ ID NO: 2542 - DNA, 20 bp, synthetic construct
  misc_feature 1..20: note = Description of Artificial Sequence: Synthetic EGFP target site sequence
  source 1..20: mol_type = other DNA
ggtggtgcagatgtacttca

SEQ ID NO: 2543 - DNA, 20 bp, synthetic construct
  misc_feature 1..20: note = Description of Artificial Sequence: Synthetic EGFP target site sequence
  source 1..20: mol_type = other DNA
ggtggtgcagatcaacttca

SEQ ID NO: 2544 - DNA, 20 bp, synthetic construct
  misc_feature 1..20: note = Description of Artificial Sequence: Synthetic EGFP target site sequence
  source 1..20: mol_type = other DNA
ggtggtgcagaagaacttca

SEQ ID NO: 2545 - DNA, 20 bp, synthetic construct
  misc_feature 1..20: note = Description of Artificial Sequence: Synthetic EGFP target site sequence
  source 1..20: mol_type = other DNA
ggtggtgcagttgaacttca

SEQ ID NO: 2546 - DNA, 20 bp, synthetic construct
  misc_feature 1..20: note = Description of Artificial Sequence: Synthetic EGFP target site sequence
  source 1..20: mol_type = other DNA
ggtggtgcacatgaacttca

SEQ ID NO: 2547 - DNA, 20 bp, synthetic construct
  misc_feature 1..20: note = Description of Artificial Sequence: Synthetic EGFP target site sequence
  source 1..20: mol_type = other DNA
ggtggtgctgatgaacttca

SEQ ID NO: 2548 - DNA, 20 bp, synthetic construct
  misc_feature 1..20: note = Description of Artificial Sequence: Synthetic EGFP target site sequence
  source 1..20: mol_type = other DNA
ggtggtggagatgaacttca

SEQ ID NO: 2549 - DNA, 20 bp, synthetic construct
  misc_feature 1..20: note = Description of Artificial Sequence: Synthetic EGFP target site sequence
  source 1..20: mol_type = other DNA
ggtggtccagatgaacttca

SEQ ID NO: 2550 - DNA, 20 bp, synthetic construct
  misc_feature 1..20: note = Description of Artificial Sequence: Synthetic EGFP target site sequence
  source 1..20: mol_type = other DNA
ggtggagcagatgaacttca

SEQ ID NO: 2551 - DNA, 20 bp, synthetic construct
  misc_feature 1..20: note = Description of Artificial Sequence: Synthetic EGFP target site sequence
  source 1..20: mol_type = other DNA
ggtgctgcagatgaacttca

SEQ ID NO: 2552 - DNA, 20 bp, synthetic construct
  misc_feature 1..20: note = Description of Artificial Sequence: Synthetic EGFP target site sequence
  source 1..20: mol_type = other DNA
ggtcgtgcagatgaacttca

SEQ ID NO: 2553 - DNA, 20 bp, synthetic construct
  misc_feature 1..20: note = Description of Artificial Sequence: Synthetic EGFP target site sequence
  source 1..20: mol_type = other DNA
ggaggtgcagatgaacttca

SEQ ID NO: 2554 - DNA, 20 bp, synthetic construct
  misc_feature 1..20: note = Description of Artificial Sequence: Synthetic EGFP target site sequence
  source 1..20: mol_type = other DNA
gctggtgcagatgaacttca

SEQ ID NO: 2555 - DNA, 20 bp, synthetic construct
  misc_feature 1..20: note = Description of Artificial Sequence: Synthetic EGFP target site sequence
  source 1..20: mol_type = other DNA
ggtggtgcagatgaacttgt

SEQ ID NO: 2556 - DNA, 20 bp, synthetic construct
  misc_feature 1..20: note = Description of Artificial Sequence: Synthetic EGFP target site sequence
  source 1..20: mol_type = other DNA
ggtggtgcagatgaacaaca

SEQ ID NO: 2557 - DNA, 20 bp, synthetic construct
  misc_feature 1..20: note = Description of Artificial Sequence: Synthetic EGFP target site sequence
  source 1..20: mol_type = other DNA
ggtggtgcagatgatgttca

SEQ ID NO: 2558 - DNA, 20 bp, synthetic construct
  misc_feature 1..20: note = Description of Artificial Sequence: Synthetic EGFP target site sequence
  source 1..20: mol_type = other DNA
ggtggtgcagatctacttca

SEQ ID NO: 2559 - DNA, 20 bp, synthetic construct
  misc_feature 1..20: note = Description of Artificial Sequence: Synthetic EGFP target site sequence
  source 1..20: mol_type = other DNA
ggtggtgcagtagaacttca

SEQ ID NO: 2560 - DNA, 20 bp, synthetic construct
  misc_feature 1..20: note = Description of Artificial Sequence: Synthetic EGFP target site sequence
  source 1..20: mol_type = other DNA
ggtggtgctcatgaacttca

SEQ ID NO: 2561 - DNA, 20 bp, synthetic construct
  misc_feature 1..20: note = Description of Artificial Sequence: Synthetic EGFP target site sequence
  source 1..20: mol_type = other DNA
ggtggtcgagatgaacttca

SEQ ID NO: 2562 - DNA, 20 bp, synthetic construct
  misc_feature 1..20: note = Description of Artificial Sequence: Synthetic EGFP target site sequence
  source 1..20: mol_type = other DNA
ggtgcagcagatgaacttca

SEQ ID NO: 2563 - DNA, 20 bp, synthetic construct
  misc_feature 1..20: note = Description of Artificial Sequence: Synthetic EGFP target site sequence
  source 1..20: mol_type = other DNA
ggacgtgcagatgaacttca

SEQ ID NO: 2564 - DNA, 20 bp, synthetic construct
  misc_feature 1..20: note = Description of Artificial Sequence: Synthetic EGFP target site sequence
  source 1..20: mol_type = other DNA
gcaggtgcagatgaacttca

SEQ ID NO: 2565 - DNA, 20 bp, synthetic construct
  misc_feature 1..20: note = Description of Artificial Sequence: Synthetic EGFP target site sequence
  source 1..20: mol_type = other DNA
gcacgtgcagatgaacttca

SEQ ID NO: 2566 - DNA, 20 bp, synthetic construct
  misc_feature 1..20: note = Description of Artificial Sequence: Synthetic EGFP target site sequence
  source 1..20: mol_type = other DNA
gcacctgcagatgaacttca

SEQ ID NO: 2567 - DNA, 20 bp, synthetic construct
  misc_feature 1..20: note = Description of Artificial Sequence: Synthetic EGFP target site sequence
  source 1..20: mol_type = other DNA
gcaccagcagatgaacttca

SEQ ID NO: 2568 - DNA, 20 bp, synthetic construct
  misc_feature 1..20: note = Description of Artificial Sequence: Synthetic EGFP target site sequence
  source 1..20: mol_type = other DNA
gcaccaccagatgaacttca

SEQ ID NO: 2569 - DNA, 20 bp, synthetic construct
  misc_feature 1..20: note = Description of Artificial Sequence: Synthetic EGFP target site sequence
  source 1..20: mol_type = other DNA
gcaccacgagatgaacttca

SEQ ID NO: 2570 - DNA, 20 bp, synthetic construct
  misc_feature 1..20: note = Description of Artificial Sequence: Synthetic EGFP target site sequence
  source 1..20: mol_type = other DNA
gcaccacgtgatgaacttca

SEQ ID NO: 2571 - DNA, 20 bp, synthetic construct
  misc_feature 1..20: note = Description of Artificial Sequence: Synthetic EGFP target site sequence
  source 1..20: mol_type = other DNA
gcaccacgtcatgaacttca

SEQ ID NO: 2572 - DNA, 20 bp, synthetic construct
  misc_feature 1..20: note = Description of Artificial Sequence: Synthetic EGFP target site sequence
  source 1..20: mol_type = other DNA
ggtggtgcagatgaactact

SEQ ID NO: 2573 - DNA, 20 bp, synthetic construct
  misc_feature 1..20: note = Description of Artificial Sequence: Synthetic EGFP target site sequence
  source 1..20: mol_type = other DNA
ggtggtgcagatgaagtaca

SEQ ID NO: 2574 - DNA, 20 bp, synthetic construct
  misc_feature 1..20: note = Description of Artificial Sequence: Synthetic EGFP target site sequence
  source 1..20: mol_type = other DNA
ggtggtgcagatgtactaca

SEQ ID NO: 2575 - DNA, 20 bp, synthetic construct
  misc_feature 1..20: note = Description of Artificial Sequence: Synthetic EGFP target site sequence
  source 1..20: mol_type = other DNA
ggtggtgcagaagaactaca

SEQ ID NO: 2576 - DNA, 20 bp, synthetic construct
  misc_feature 1..20: note = Description of Artificial Sequence: Synthetic EGFP target site sequence
  source 1..20: mol_type = other DNA
ggtggtgcacatgaactaca

SEQ ID NO: 2577 - DNA, 20 bp, synthetic construct
  misc_feature 1..20: note = Description of Artificial Sequence: Synthetic EGFP target site sequence
  source 1..20: mol_type = other DNA
ggtggtggagatgaactaca

SEQ ID NO: 2578 - DNA, 20 bp, synthetic construct
  misc_feature 1..20: note = Description of Artificial Sequence: Synthetic EGFP target site sequence
  source 1..20: mol_type = other DNA
ggtggagcagatgaactaca

SEQ ID NO: 2579 - DNA, 20 bp, synthetic construct
  misc_feature 1..20: note = Description of Artificial Sequence: Synthetic EGFP target site sequence
  source 1..20: mol_type = other DNA
ggtcgtgcagatgaactaca

SEQ ID NO: 2580 - DNA, 20 bp, synthetic construct
  misc_feature 1..20: note = Description of Artificial Sequence: Synthetic EGFP target site sequence
  source 1..20: mol_type = other DNA
gctggtgcagatgaactaca

SEQ ID NO: 2581 - DNA, 20 bp, synthetic construct
  misc_feature 1..20: note = Description of Artificial Sequence: Synthetic EGFP target site sequence
  source 1..20: mol_type = other DNA
ggtggtgcacatgaacttct

SEQ ID NO: 2582 - DNA, 20 bp, synthetic construct
  misc_feature 1..20: note = Description of Artificial Sequence: Synthetic EGFP target site sequence
  source 1..20: mol_type = other DNA
ggtggtgcacatgaagttca

SEQ ID NO: 2583 - DNA, 20 bp, synthetic construct
  misc_feature 1..20: note = Description of Artificial Sequence: Synthetic EGFP target site sequence
  source 1..20: mol_type = other DNA
ggtggtgcacatgtacttca

SEQ ID NO: 2584 - DNA, 20 bp, synthetic construct
  misc_feature 1..20: note = Description of Artificial Sequence: Synthetic EGFP target site sequence
  source 1..20: mol_type = other DNA
ggtggtgcacaagaacttca

SEQ ID NO: 2585 - DNA, 20 bp, synthetic construct
  misc_feature 1..20: note = Description of Artificial Sequence: Synthetic EGFP target site sequence
  source 1..20: mol_type = other DNA
ggtggtggacatgaacttca

SEQ ID NO: 2586 - DNA, 20 bp, synthetic construct
  misc_feature 1..20: note = Description of Artificial Sequence: Synthetic EGFP target site sequence
  source 1..20: mol_type = other DNA
ggtggagcacatgaacttca

SEQ ID NO: 2587 - DNA, 20 bp, synthetic construct
  misc_feature 1..20: note = Description of Artificial Sequence: Synthetic EGFP target site sequence
  source 1..20: mol_type = other DNA
ggtcgtgcacatgaacttca

SEQ ID NO: 2588 - DNA, 20 bp, synthetic construct
  misc_feature 1..20: note = Description of Artificial Sequence: Synthetic EGFP target site sequence
  source 1..20: mol_type = other DNA
gctggtgcacatgaacttca

SEQ ID NO: 2589 - DNA, 20 bp, synthetic construct
  misc_feature 1..20: note = Description of Artificial Sequence: Synthetic EGFP target site sequence
  source 1..20: mol_type = other DNA
gctggtgcagatgaacttct

SEQ ID NO: 2590 - DNA, 20 bp, synthetic construct
  misc_feature 1..20: note = Description of Artificial Sequence: Synthetic EGFP target site sequence
  source 1..20: mol_type = other DNA
gctggtgcagatgaagttca

SEQ ID NO: 2591 - DNA, 20 bp, synthetic construct
  misc_feature 1..20: note = Description of Artificial Sequence: Synthetic EGFP target site sequence
  source 1..20: mol_type = other DNA
gctggtgcagatgtacttca

SEQ ID NO: 2592 - DNA, 20 bp, synthetic construct
  misc_feature 1..20: note = Description of Artificial Sequence: Synthetic EGFP target site sequence
  source 1..20: mol_type = other DNA
gctggtgcagaagaacttca

SEQ ID NO: 2593 - DNA, 20 bp, synthetic construct
  misc_feature 1..20: note = Description of Artificial Sequence: Synthetic EGFP target site sequence
  source 1..20: mol_type = other DNA
gctggtggagatgaacttca

SEQ ID NO: 2594 - DNA, 20 bp, synthetic construct
  misc_feature 1..20: note = Description of Artificial Sequence: Synthetic EGFP target site sequence
  source 1..20: mol_type = other DNA
gctggagcagatgaacttca

SEQ ID NO: 2595 - DNA, 20 bp, synthetic construct
  misc_feature 1..20: note = Description of Artificial Sequence: Synthetic EGFP target site sequence
  source 1..20: mol_type = other DNA
gctcgtgcagatgaacttca

SEQ ID NO: 2596 - DNA, 20 bp, synthetic construct
  misc_feature 1..20: note = Description of Artificial Sequence: Synthetic VEGFA target site sequence
  source 1..20: mol_type = other DNA
gggtggggggagtttgctcc

SEQ ID NO: 2597 - DNA, 20 bp, synthetic construct
  misc_feature 1..20: note = Description of Artificial Sequence: Synthetic VEGFA target site sequence
  source 1..20: mol_type = other DNA
gaccccctccaccccgcctc

SEQ ID NO: 2598 - DNA, 20 bp, synthetic construct
  misc_feature 1..20: note = Description of Artificial Sequence: Synthetic VEGFA target site sequence
  source 1..20: mol_type = other DNA
ggtgagtgagtgtgtgcgtg

SEQ ID NO: 2599 - DNA, 20 bp, synthetic construct
  misc_feature 1..20: note = Description of Artificial Sequence: Synthetic EMX1 target site sequence
  source 1..20: mol_type = other DNA
gagtccgagcagaagaagaa

SEQ ID NO: 2600 - DNA, 20 bp, synthetic construct
  misc_feature 1..20: note = Description of Artificial Sequence: Synthetic RNF2 target site sequence
  source 1..20: mol_type = other DNA
gtcatcttagtcattacctg

SEQ ID NO: 2601 - DNA, 20 bp, synthetic construct
  misc_feature 1..20: note = Description of Artificial Sequence: Synthetic FANCF target site sequence
  source 1..20: mol_type = other DNA
ggaatcccttctgcagcacc

SEQ ID NO: 2602 - DNA, 18 bp, synthetic construct
  misc_feature 1..18: note = Description of Artificial Sequence: Synthetic EGFP target site sequence
  source 1..18: mol_type = other DNA
gcacgggcagcttgccgg

SEQ ID NO: 2603 - DNA, 18 bp, synthetic construct
  misc_feature 1..18: note = Description of Artificial Sequence: Synthetic EGFP target site sequence
  source 1..18: mol_type = other DNA
gcacgggcagcttgccgc

SEQ ID NO: 2604 - DNA, 18 bp, synthetic construct
  misc_feature 1..18: note = Description of Artificial Sequence: Synthetic EGFP target site sequence
  source 1..18: mol_type = other DNA
gcacgggcagcttgcccg

SEQ ID NO: 2605 - DNA, 18 bp, synthetic construct
  misc_feature 1..18: note = Description of Artificial Sequence: Synthetic EGFP target site sequence
  source 1..18: mol_type = other DNA
gcacgggcagcttgcggg

SEQ ID NO: 2606 - DNA, 18 bp, synthetic construct
  misc_feature 1..18: note = Description of Artificial Sequence: Synthetic EGFP target site sequence
  source 1..18: mol_type = other DNA
gcacgggcagcttggcgg

SEQ ID NO: 2607 - DNA, 18 bp, synthetic construct
  misc_feature 1..18: note = Description of Artificial Sequence: Synthetic EGFP target site sequence
  source 1..18: mol_type = other DNA
gcacgggcagcttcccgg

SEQ ID NO: 2608 - DNA, 18 bp, synthetic construct
  misc_feature 1..18: note = Description of Artificial Sequence: Synthetic EGFP target site sequence
  source 1..18: mol_type = other DNA
gcacgggcagctagccgg

SEQ ID NO: 2609 - DNA, 18 bp, synthetic construct
  misc_feature 1..18: note = Description of Artificial Sequence: Synthetic EGFP target site sequence
  source 1..18: mol_type = other DNA
gcacgggcagcatgccgg

SEQ ID NO: 2610 - DNA, 18 bp, synthetic construct
  misc_feature 1..18: note = Description of Artificial Sequence: Synthetic EGFP target site sequence
  source 1..18: mol_type = other DNA
gcacgggcaggttgccgg

SEQ ID NO: 2611 - DNA, 18 bp, synthetic construct
  misc_feature 1..18: note = Description of Artificial Sequence: Synthetic EGFP target site sequence
  source 1..18: mol_type = other DNA
gcacgggcaccttgccgg

SEQ ID NO: 2612 - DNA, 18 bp, synthetic construct
  misc_feature 1..18: note = Description of Artificial Sequence: Synthetic EGFP target site sequence
  source 1..18: mol_type = other DNA
gcacgggctgcttgccgg

SEQ ID NO: 2613 - DNA, 18 bp, synthetic construct
  misc_feature 1..18: note = Description of Artificial Sequence: Synthetic EGFP target site sequence
  source 1..18: mol_type = other DNA
gcacggggagcttgccgg

SEQ ID NO: 2614 - DNA, 18 bp, synthetic construct
  misc_feature 1..18: note = Description of Artificial Sequence: Synthetic EGFP target site sequence
  source 1..18: mol_type = other DNA
gcacggccagcttgccgg

SEQ ID NO: 2615 - DNA, 18 bp, synthetic construct
  misc_feature 1..18: note = Description of Artificial Sequence: Synthetic EGFP target site sequence
  source 1..18: mol_type = other DNA
gcacgcgcagcttgccgg

SEQ ID NO: 2616 - DNA, 18 bp, synthetic construct
  misc_feature 1..18: note = Description of Artificial Sequence: Synthetic EGFP target site sequence
  source 1..18: mol_type = other DNA
gcaccggcagcttgccgg

SEQ ID NO: 2617 - DNA, 18 bp, synthetic construct
  misc_feature 1..18: note = Description of Artificial Sequence: Synthetic EGFP target site sequence
  source 1..18: mol_type = other DNA
gcaggggcagcttgccgg

SEQ ID NO: 2618 - DNA, 18 bp, synthetic construct
  misc_feature 1..18: note = Description of Artificial Sequence: Synthetic EGFP target site sequence
  source 1..18: mol_type = other DNA
gctcgggcagcttgccgg

SEQ ID NO: 2619 - DNA, 18 bp, synthetic construct
  misc_feature 1..18: note = Description of Artificial Sequence: Synthetic EGFP target site sequence
  source 1..18: mol_type = other DNA
ggacgggcagcttgccgg

SEQ ID NO: 2620 - DNA, 18 bp, synthetic construct
  misc_feature 1..18: note = Description of Artificial Sequence: Synthetic EGFP target site sequence
  source 1..18: mol_type = other DNA
gcacgggcagcttgcccc

SEQ ID NO: 2621 - DNA, 18 bp, synthetic construct
  misc_feature 1..18: note = Description of Artificial Sequence: Synthetic EGFP target site sequence
  source 1..18: mol_type = other DNA
gcacgggcagcttggggg

SEQ ID NO: 2622 - DNA, 18 bp, synthetic construct
  misc_feature 1..18: note = Description of Artificial Sequence: Synthetic EGFP target site sequence
  source 1..18: mol_type = other DNA
gcacgggcagctacccgg

SEQ ID NO: 2623 - DNA, 18 bp, synthetic construct
  misc_feature 1..18: note = Description of Artificial Sequence: Synthetic EGFP target site sequence
  source 1..18: mol_type = other DNA
gcacgggcaggatgccgg

SEQ ID NO: 2624 - DNA, 18 bp, synthetic construct
  misc_feature 1..18: note = Description of Artificial Sequence: Synthetic EGFP target site sequence
  source 1..18: mol_type = other DNA
gcacgggctccttgccgg

SEQ ID NO: 2625 - DNA, 18 bp, synthetic construct
  misc_feature 1..18: note = Description of Artificial Sequence: Synthetic EGFP target site sequence
  source 1..18: mol_type = other DNA
gcacggcgagcttgccgg

SEQ ID NO: 2626 - DNA, 18 bp, synthetic construct
  misc_feature 1..18: note = Description of Artificial Sequence: Synthetic EGFP target site sequence
  source 1..18: mol_type = other DNA
gcacccgcagcttgccgg

SEQ ID NO: 2627 - DNA, 18 bp, synthetic construct
  misc_feature 1..18: note = Description of Artificial Sequence: Synthetic EGFP target site sequence
  source 1..18: mol_type = other DNA
gctggggcagcttgccgg

SEQ ID NO: 2628 - DNA, 18 bp, synthetic construct
  misc_feature 1..18: note = Description of Artificial Sequence: Synthetic EGFP target site sequence
  source 1..18: mol_type = other DNA
ggtcgggcagcttgccgg

SEQ ID NO: 2629 - DNA, 17 bp, synthetic construct
  misc_feature 1..17: note = Description of Artificial Sequence: Synthetic EGFP target site sequence
  source 1..17: mol_type = other DNA
gccgttcttctgcttgt

SEQ ID NO: 2630 - DNA, 17 bp, synthetic construct
  misc_feature 1..17: note = Description of Artificial Sequence: Synthetic EGFP target site sequence
  source 1..17: mol_type = other DNA
gccgttcttctgcttga

SEQ ID NO: 2631 - DNA, 17 bp, synthetic construct
  misc_feature 1..17: note = Description of Artificial Sequence: Synthetic EGFP target site sequence
  source 1..17: mol_type = other DNA
gccgttcttctgcttct

SEQ ID NO: 2632 - DNA, 17 bp, synthetic construct
  misc_feature 1..17: note = Description of Artificial Sequence: Synthetic EGFP target site sequence
  source 1..17: mol_type = other DNA
gccgttcttctgctagt

SEQ ID NO: 2633 - DNA, 17 bp, synthetic construct
  misc_feature 1..17: note = Description of Artificial Sequence: Synthetic EGFP target site sequence
  source 1..17: mol_type = other DNA
gccgttcttctgcatgt

SEQ ID NO: 2634 - DNA, 17 bp, synthetic construct
  misc_feature 1..17: note = Description of Artificial Sequence: Synthetic EGFP target site sequence
  source 1..17: mol_type = other DNA
gccgttcttctggttgt

SEQ ID NO: 2635 - DNA, 17 bp, synthetic construct
  misc_feature 1..17: note = Description of Artificial Sequence: Synthetic EGFP target site sequence
  source 1..17: mol_type = other DNA
gccgttcttctccttgt

SEQ ID NO: 2636 - DNA, 17 bp, synthetic construct
  misc_feature 1..17: note = Description of Artificial Sequence: Synthetic EGFP target site sequence
  source 1..17: mol_type = other DNA
gccgttcttcagcttgt

SEQ ID NO: 2637 - DNA, 17 bp, synthetic construct
  misc_feature 1..17: note = Description of Artificial Sequence: Synthetic EGFP target site sequence
  source 1..17: mol_type = other DNA
gccgttcttgtgcttgt

SEQ ID NO: 2638 - DNA, 17 bp, synthetic construct
  misc_feature 1..17: note = Description of Artificial Sequence: Synthetic EGFP target site sequence
  source 1..17: mol_type = other DNA
gccgttctactgcttgt

SEQ ID NO: 2639 - DNA, 17 bp, synthetic construct
  misc_feature 1..17: note = Description of Artificial Sequence: Synthetic EGFP target site sequence
  source 1..17: mol_type = other DNA
gccgttcatctgcttgt

SEQ ID NO: 2640 - DNA, 17 bp, synthetic construct
  misc_feature 1..17: note = Description of Artificial Sequence: Synthetic EGFP target site sequence
  source 1..17: mol_type = other DNA
gccgttgttctgcttgt

SEQ ID NO: 2641 - DNA, 17 bp, synthetic construct
  misc_feature 1..17: note = Description of Artificial Sequence: Synthetic EGFP target site sequence
  source 1..17: mol_type = other DNA
gccgtacttctgcttgt

SEQ ID NO: 2642 - DNA, 17 bp, synthetic construct
  misc_feature 1..17: note = Description of Artificial Sequence: Synthetic EGFP target site sequence
  source 1..17: mol_type = other DNA
gccgatcttctgcttgt

SEQ ID NO: 2643 - DNA, 17 bp, synthetic construct
  misc_feature 1..17: note = Description of Artificial Sequence: Synthetic EGFP target site sequence
  source 1..17: mol_type = other DNA
gcccttcttctgcttgt

SEQ ID NO: 2644 - DNA, 17 bp, synthetic construct
  misc_feature 1..17: note = Description of Artificial Sequence: Synthetic EGFP target site sequence
  source 1..17: mol_type = other DNA
gcggttcttctgcttgt

SEQ ID NO: 2645 - DNA, 17 bp, synthetic construct
  misc_feature 1..17: note = Description of Artificial Sequence: Synthetic EGFP target site sequence
  source 1..17: mol_type = other DNA
ggcgttcttctgcttgt

SEQ ID NO: 2646 - DNA, 17 bp, synthetic construct
  misc_feature 1..17: note = Description of Artificial Sequence: Synthetic EGFP target site sequence
  source 1..17: mol_type = other DNA
gccgttcttctgcttca

SEQ ID NO: 2647 - DNA, 17 bp, synthetic construct
  misc_feature 1..17: note = Description of Artificial Sequence: Synthetic EGFP target site sequence
  source 1..17: mol_type = other DNA
gccgttcttctgcaagt

SEQ ID NO: 2648 - DNA, 17 bp, synthetic construct
  misc_feature 1..17: note = Description of Artificial Sequence: Synthetic EGFP target site sequence
  source 1..17: mol_type = other DNA
gccgttcttctcgttgt

SEQ ID NO: 2649 - DNA, 17 bp, synthetic construct
  misc_feature 1..17: note = Description of Artificial Sequence: Synthetic EGFP target site sequence
  source 1..17: mol_type = other DNA
gccgttcttgagcttgt

SEQ ID NO: 2650 - DNA, 17 bp, synthetic construct
  misc_feature 1..17: note = Description of Artificial Sequence: Synthetic EGFP target site sequence
  source 1..17: mol_type = other DNA
gccgttcaactgcttgt

SEQ ID NO: 2651 - DNA, 17 bp, synthetic construct
  misc_feature 1..17: note = Description of Artificial Sequence: Synthetic EGFP target site sequence
  source 1..17: mol_type = other DNA
gccgtagttctgcttgt

SEQ ID NO: 2652 - DNA, 17 bp, synthetic construct
  misc_feature 1..17: note = Description of Artificial Sequence: Synthetic EGFP target site sequence
  source 1..17: mol_type = other DNA
gcccatcttctgcttgt

SEQ ID NO: 2653 - DNA, 17 bp, synthetic construct
  misc_feature 1..17: note = Description of Artificial Sequence: Synthetic EGFP target site sequence
  source 1..17: mol_type = other DNA
ggggttcttctgcttgt

SEQ ID NO: 2654 - DNA, 17 bp, synthetic construct
  misc_feature 1..17: note = Description of Artificial Sequence: Synthetic EGFP target site sequence
  source 1..17: mol_type = other DNA
ggtgcagatgaacttca

SEQ ID NO: 2655 - DNA, 17 bp, synthetic construct
  misc_feature 1..17: note = Description of Artificial Sequence: Synthetic EGFP target site sequence
  source 1..17: mol_type = other DNA
ggtgcagatgaacttct

SEQ ID NO: 2656 - DNA, 17 bp, synthetic construct
  misc_feature 1..17: note = Description of Artificial Sequence: Synthetic EGFP target site sequence
  source 1..17: mol_type = other DNA
ggtgcagatgaacttga

SEQ ID NO: 2657 - DNA, 17 bp, synthetic construct
  misc_feature 1..17: note = Description of Artificial Sequence: Synthetic EGFP target site sequence
  source 1..17: mol_type = other DNA
ggtgcagatgaactaca

SEQ ID NO: 2658 - DNA, 17 bp, synthetic construct
  misc_feature 1..17: note = Description of Artificial Sequence: Synthetic EGFP target site sequence
  source 1..17: mol_type = other DNA
ggtgcagatgaacatca

SEQ ID NO: 2659 - DNA, 17 bp, synthetic construct
  misc_feature 1..17: note = Description of Artificial Sequence: Synthetic EGFP target site sequence
  source 1..17: mol_type = other DNA
ggtgcagatgaagttca

SEQ ID NO: 2660 - DNA, 17 bp, synthetic construct
  misc_feature 1..17: note = Description of Artificial Sequence: Synthetic EGFP target site sequence
  source 1..17: mol_type = other DNA
ggtgcagatgatcttca

SEQ ID NO: 2661 - DNA, 17 bp, synthetic construct
  misc_feature 1..17: note = Description of Artificial Sequence: Synthetic EGFP target site sequence
  source 1..17: mol_type = other DNA
ggtgcagatgtacttca

SEQ ID NO: 2662 - DNA, 17 bp, synthetic construct
  misc_feature 1..17: note = Description of Artificial Sequence: Synthetic EGFP target site sequence
  source 1..17: mol_type = other DNA
ggtgcagatcaacttca

SEQ ID NO: 2663 - DNA, 17 bp, synthetic construct
  misc_feature 1..17: note = Description of Artificial Sequence: Synthetic EGFP target site sequence
  source 1..17: mol_type = other DNA
ggtgcagaagaacttca

SEQ ID NO: 2664 - DNA, 17 bp, synthetic construct
  misc_feature 1..17: note = Description of Artificial Sequence: Synthetic EGFP target site sequence
  source 1..17: mol_type = other DNA
ggtgcagttgaacttca

SEQ ID NO: 2665 - DNA, 17 bp, synthetic construct
  misc_feature 1..17: note = Description of Artificial Sequence: Synthetic EGFP target site sequence
  source 1..17: mol_type = other DNA
ggtgcacatgaacttca

SEQ ID NO: 2666 - DNA, 17 bp, synthetic construct
  misc_feature 1..17: note = Description of Artificial Sequence: Synthetic EGFP target site sequence
  source 1..17: mol_type = other DNA
ggtgctgatgaacttca

SEQ ID NO: 2667 - DNA, 17 bp, synthetic construct
  misc_feature 1..17: note = Description of Artificial Sequence: Synthetic EGFP target site sequence
  source 1..17: mol_type = other DNA
ggtggagatgaacttca

SEQ ID NO: 2668 - DNA, 17 bp, synthetic construct
  misc_feature 1..17: note = Description of Artificial Sequence: Synthetic EGFP target site sequence
  source 1..17: mol_type = other DNA
ggtccagatgaacttca

SEQ ID NO: 2669 - DNA, 17 bp, synthetic construct
  misc_feature 1..17: note = Description of Artificial Sequence: Synthetic EGFP target site sequence
  source 1..17: mol_type = other DNA
ggagcagatgaacttca

SEQ ID NO: 2670 - DNA, 17 bp, synthetic construct
  misc_feature 1..17: note = Description of Artificial Sequence: Synthetic EGFP target site sequence
  source 1..17: mol_type = other DNA
gctgcagatgaacttca

SEQ ID NO: 2671 - DNA, 17 bp, synthetic construct
  misc_feature 1..17: note = Description of Artificial Sequence: Synthetic EGFP target site sequence
  source 1..17: mol_type = other DNA
ggtgcagatgaacttgt

SEQ ID NO: 2672 - DNA, 17 bp, synthetic construct
  misc_feature 1..17: note = Description of Artificial Sequence: Synthetic EGFP target site sequence
  source 1..17: mol_type = other DNA
ggtgcagatgaacaaca

SEQ ID NO: 2673 - DNA, 17 bp, synthetic construct
  misc_feature 1..17: note = Description of Artificial Sequence: Synthetic EGFP target site sequence
  source 1..17: mol_type = other DNA
ggtgcagatgatgttca

SEQ ID NO: 2674 - DNA, 17 bp, synthetic construct
  misc_feature 1..17: note = Description of Artificial Sequence: Synthetic EGFP target site sequence
  source 1..17: mol_type = other DNA
ggtgcagatctacttca

SEQ ID NO: 2675 - DNA, 17 bp, synthetic construct
  misc_feature 1..17: note = Description of Artificial Sequence: Synthetic EGFP target site sequence
  source 1..17: mol_type = other DNA
ggtgcagtagaacttca

SEQ ID NO: 2676 - DNA, 17 bp, synthetic construct
  misc_feature 1..17: note = Description of Artificial Sequence: Synthetic EGFP target site sequence
  source 1..17: mol_type = other DNA
ggtgctcatgaacttca

SEQ ID NO: 2677 - DNA, 17 bp, synthetic construct
  misc_feature 1..17: note = Description of Artificial Sequence: Synthetic EGFP target site sequence
  source 1..17: mol_type = other DNA
ggtcgagatgaacttca

SEQ ID NO: 2678 - DNA, 17 bp, synthetic construct
  misc_feature 1..17: note = Description of Artificial Sequence: Synthetic EGFP target site sequence
  source 1..17: mol_type = other DNA
gcagcagatgaacttca

SEQ ID NO: 2679 - DNA, 18 bp, synthetic construct
  misc_feature 1..18: note = Description of Artificial Sequence: Synthetic VEGFA Site 1 true-gRNA target sequence
  source 1..18: mol_type = other DNA
gtggggggagtttgctcc

SEQ ID NO: 2680 - DNA, 17 bp, synthetic construct
  misc_feature 1..17: note = Description of Artificial Sequence: Synthetic VEGFA Site 3 true-gRNA target sequence
  source 1..17: mol_type = other DNA
gagtgagtgtgtgcgtg

SEQ ID NO: 2681 - DNA, 18 bp, synthetic construct
  misc_feature 1..18: note = Description of Artificial Sequence: Synthetic EMX1 Site 1 true-gRNA target sequence
  source 1..18: mol_type = other DNA
gtccgagcagaagaagaa

SEQ ID NO: 2682 - DNA, 20 bp, synthetic construct
  misc_feature 1..20: note = Description of Artificial Sequence: Synthetic CTLA full-length gRNA target sequence
  source 1..20: mol_type = other DNA
gcagatgtagtgtttccaca

SEQ ID NO: 2683 - DNA, 17 bp, synthetic construct
  misc_feature 1..17: note = Description of Artificial Sequence: Synthetic CTLA tru-gRNA target sequence
  source 1..17: mol_type = other DNA
gatgtagtgtttccaca

SEQ ID NO: 2684 - DNA, 20 bp, synthetic construct
  misc_feature 1..20: note = Description of Artificial Sequence: Synthetic VEGFA site 4 full length gRNA target sequence
  source 1..20: mol_type = other DNA
tccctctttagccagagccg

SEQ ID NO: 2685 - DNA, 20 bp, synthetic construct
  misc_feature 1..20: note = Description of Artificial Sequence: Synthetic EMX1 site 2 full length gRNA target sequence
  source 1..20: mol_type = other DNA
gccgtttgtactttgtcctc

SEQ ID NO: 2686 - DNA, 17 bp, synthetic construct
  misc_feature 1..17: note = Description of Artificial Sequence: Synthetic EMX1 site 2 tru-gRNA target sequence
  source 1..17: mol_type = other DNA
gtttgtactttgtcctc

SEQ ID NO: 2687 - DNA, 20 bp, synthetic construct
  misc_feature 1..20: note = Description of Artificial Sequence: Synthetic EMX1 site 3 full-length gRNA target sequence
  source 1..20: mol_type = other DNA
gggaagactgaggctacata

SEQ ID NO: 2688 - DNA, 18 bp, synthetic construct
  misc_feature 1..18: note = Description of Artificial Sequence: Synthetic EMX1 site 3 tru-gRNA target sequence
  source 1..18: mol_type = other DNA
gaagactgaggctacata

SEQ ID NO: 2689 - DNA, 20 bp, synthetic construct
  misc_feature 1..20: note = Description of Artificial Sequence: Synthetic EMX1 site 4 full length gRNA target sequence
  source 1..20: mol_type = other DNA
gaggcccccagagcagccac

SEQ ID NO: 2690 - DNA, 17 bp, synthetic construct
  misc_feature 1..17: note = Description of Artificial Sequence: Synthetic EMX1 site 4 tru-gRNA target sequence
  source 1..17: mol_type = other DNA
gcccccagagcagccac

SEQ ID NO: 2691 - DNA, 23 bp, synthetic construct
  misc_feature 1..23: note = Description of Artificial Sequence: Synthetic EGFP target binding site
  source 1..23: mol_type = other DNA
ggtgagtgagtgtgtgcgtgtgg

SEQ ID NO: 2692 - DNA, 23 bp, synthetic construct
  misc_feature 1..23: note = Description of Artificial Sequence: Synthetic EGFP target binding site
  source 1..23: mol_type = other DNA
ccacacgcacacactcactcacc

SEQ ID NO: 2693 - RNA, 20 nt, synthetic construct
  misc_feature 1..20: note = Description of Artificial Sequence: Synthetic guide RNA
  source 1..20: mol_type = other RNA
gtgcgtgtgtgagtgagtgg

SEQ ID NO: 2694 - DNA, 18 bp, synthetic construct
  misc_feature 1..18: note = Description of Artificial Sequence: Synthetic target binding site sequence
  source 1..18: mol_type = other DNA
gggcgatgccacctacgg

SEQ ID NO: 2695 - DNA, 20 bp, synthetic construct
  misc_feature 1..20: note = Description of Artificial Sequence: Synthetic target binding site sequence
  source 1..20: mol_type = other DNA
gagggcgatgccacctacgg

SEQ ID NO: 2696 - DNA, 22 bp, synthetic construct
  misc_feature 1..22: note = Description of Artificial Sequence: Synthetic target binding site sequence
  source 1..22: mol_type = other DNA
gcgagggcgatgccacctacgg

SEQ ID NO: 2697 - DNA, 23 bp, synthetic construct
  misc_feature 1..23: note = Description of Artificial Sequence: Synthetic target binding site sequence
  source 1..23: mol_type = other DNA
ggcgagggcgatgccacctacgg

SEQ ID NO: 2698 - DNA, 24 bp, synthetic construct
  misc_feature 1..24: note = Description of Artificial Sequence: Synthetic target binding site sequence
  source 1..24: mol_type = other DNA
gggcgagggcgatgccacctacgg

SEQ ID NO: 2699 - DNA, 26 bp, synthetic construct
  misc_feature 1..26: note = Description of Artificial Sequence: Synthetic target binding site sequence
  source 1..26: mol_type = other DNA
gagggcgagggcgatgccacctacgg

SEQ ID NO: 2700 - DNA, 28 bp, synthetic construct
  misc_feature 1..28: note = Description of Artificial Sequence: Synthetic target binding site sequence
  source 1..28: mol_type = other DNA
gcgagggcgagggcgatgccacctacgg

SEQ ID NO: 2701 - DNA, 21 bp, synthetic construct
  misc_feature 1..21: note = Description of Artificial Sequence: Synthetic EGFP target binding site sequence
  source 1..21: mol_type = other DNA
gcacgggcagcttgccggtgg

SEQ ID NO: 2702 - DNA, 20 bp, synthetic construct
  misc_feature 1..20: note = Description of Artificial Sequence: Synthetic EGFP target binding site sequence
  source 1..20: mol_type = other DNA
gccgttcttctgcttgtcgg

SEQ ID NO: 2703 - DNA, 19 bp, synthetic construct
  misc_feature 1..19: note = Description of Artificial Sequence: Synthetic EGFP target binding site sequence
  source 1..19: mol_type = other DNA
gtgcagatgaacttcaggg

SEQ ID NO: 2704 - DNA, 20 bp, synthetic construct
  misc_feature 1..20: note = Description of Artificial Sequence: Synthetic EGFP target binding site sequence
  source 1..20: mol_type = other DNA
ggtgcagatgaacttcaggg

SEQ ID NO: 2705 - DNA, 19 bp, synthetic construct
  misc_feature 1..19: note = Description of Artificial Sequence: Synthetic EGFP target binding site sequence
  source 1..19: mol_type = other DNA
gaggagctgttcaccgggg

SEQ ID NO: 2706 - DNA, 21 bp, synthetic construct
  misc_feature 1..21: note = Description of Artificial Sequence: Synthetic EGFP target binding site sequence
  source 1..21: mol_type = other DNA
gcgaggagctgttcaccgggg

SEQ ID NO: 2707 - DNA, 23 bp, synthetic construct
  misc_feature 1..23: note = Description of Artificial Sequence: Synthetic EGFP target binding site sequence
  source 1..23: mol_type = other DNA
gggcgaggagctgttcaccgggg

SEQ ID NO: 2708 - DNA, 21 bp, synthetic construct
  misc_feature 1..21: note = Description of Artificial Sequence: Synthetic VEGFA target binding site sequence
  source 1..21: mol_type = other DNA
gtggggggagtttgctcctgg

SEQ ID NO: 2709 - DNA, 23 bp, synthetic construct
  misc_feature 1..23: note = Description of Artificial Sequence: Synthetic VEGFA target binding site sequence
  source 1..23: mol_type = other DNA
gggtggggggagtttgctcctgg

SEQ ID NO: 2710 - DNA, 20 bp, synthetic construct
  misc_feature 1..20: note = Description of Artificial Sequence: Synthetic VEGFA target binding site sequence
  source 1..20: mol_type = other DNA
gagtgagtgtgtgcgtgtgg

SEQ ID NO: 2711 - DNA, 23 bp, synthetic construct
  misc_feature 1..23: note = Description of Artificial Sequence: Synthetic VEGFA target binding site sequence
  source 1..23: mol_type = other DNA
ggtgagtgagtgtgtgcgtgtgg

SEQ ID NO: 2712 - DNA, 21 bp, synthetic construct
  misc_feature 1..21: note = Description of Artificial Sequence: Synthetic EMX1 target binding site sequence
  source 1..21: mol_type = other DNA
gtccgagcagaagaagaaggg

SEQ ID NO: 2713 - DNA, 23 bp, synthetic construct
  misc_feature 1..23: note = Description of Artificial Sequence: Synthetic EMX1 target binding site sequence
  source 1..23: mol_type = other DNA
gagtccgagcagaagaagaaggg

SEQ ID NO: 2714 - DNA, 20 bp, synthetic construct
  misc_feature 1..20: note = Description of Artificial Sequence: Synthetic EMX1 target binding site sequence
  source 1..20: mol_type = other DNA
gtttgtactttgtcctccgg

SEQ ID NO: 2715 - DNA, 23 bp, synthetic construct
  misc_feature 1..23: note = Description of Artificial Sequence: Synthetic EMX1 target binding site sequence
  source 1..23: mol_type = other DNA
gccgtttgtactttgtcctccgg

SEQ ID NO: 2716 - DNA, 21 bp, synthetic construct
  misc_feature 1..21: note = Description of Artificial Sequence: Synthetic EMX1 target binding site sequence
  source 1..21: mol_type = other DNA
gaagactgaggctacataggg

SEQ ID NO: 2717 - DNA, 23 bp, synthetic construct
  misc_feature 1..23: note = Description of Artificial Sequence: Synthetic EMX1 target binding site sequence
  source 1..23: mol_type = other DNA
gggaagactgaggctacataggg

SEQ ID NO: 2718 - DNA, 20 bp, synthetic construct
  misc_feature 1..20: note = Description of Artificial Sequence: Synthetic EMX1 target binding site sequence
  source 1..20: mol_type = other DNA
gcccccagagcagccactgg

SEQ ID NO: 2719 - DNA, 23 bp, synthetic construct
  misc_feature 1..23: note = Description of Artificial Sequence: Synthetic EMX1 target binding site sequence
  source 1..23: mol_type = other DNA
gaggcccccagagcagccactgg

SEQ ID NO: 2720 - DNA, 20 bp, synthetic construct
  misc_feature 1..20: note = Description of Artificial Sequence: Synthetic CLTA target binding site sequence
  source 1..20: mol_type = other DNA
gatgtagtgtttccacaggg

SEQ ID NO: 2721 - DNA, 23 bp, synthetic construct
  misc_feature 1..23: note = Description of Artificial Sequence: Synthetic CLTA target binding site sequence
  source 1..23: mol_type = other DNA
gcagatgtagtgtttccacaggg

SEQ ID NO: 2722 - DNA, 67 bp, synthetic construct
  misc_feature 1..67: note = Description of Artificial Sequence: Synthetic target binding site sequence
  source 1..67: mol_type = other DNA
gaagctggaggaggaagggcctgagtccgagcagaagaagaagggctcccatcacatcaaccggtgg

SEQ ID NO: 2723 - DNA, 15 bp, synthetic construct
  misc_feature 1..15: note = Description of Artificial Sequence: Synthetic target binding site sequence
  source 1..15: mol_type = other DNA
gaagctggaggagga

SEQ ID NO: 2724 - DNA, 11 bp, synthetic construct
  misc_feature 1..11: note = Description of Artificial Sequence: Synthetic target binding site sequence
  source 1..11: mol_type = other DNA
tcaaccggtgg

SEQ ID NO: 2725 - DNA, 18 bp, synthetic construct
  misc_feature 1..18: note = Description of Artificial Sequence: Synthetic target binding site sequence
  source 1..18: mol_type = other DNA
gaagctggaggaggaagg

SEQ ID NO: 2726 - DNA, 25 bp, synthetic construct
  misc_feature 1..25: note = Description of Artificial Sequence: Synthetic target binding site sequence
  source 1..25: mol_type = other DNA
gggctcccatcacatcaaccggtgg

SEQ ID NO: 2727 - DNA, 24 bp, synthetic construct
  misc_feature 1..24: note = Description of Artificial Sequence: Synthetic target binding site sequence
  source 1..24: mol_type = other DNA
gaagctggaggaggaagggcctga

SEQ ID NO: 2728 - DNA, 14 bp, synthetic construct
  misc_feature 1..14: note = Description of Artificial Sequence: Synthetic target binding site sequence
  source 1..14: mol_type = other DNA
gaagctggaggagg

SEQ ID NO: 2729 - DNA, 39 bp, synthetic construct
  misc_feature 1..39: note = Description of Artificial Sequence: Synthetic target binding site sequence
  source 1..39: mol_type = other DNA
gaagctggaggaggaagggcccatcacatcaaccggtgg

SEQ ID NO: 2730 - DNA, 40 bp, synthetic construct
  misc_feature 1..40: note = Description of Artificial Sequence: Synthetic target binding site sequence
  source 1..40: mol_type = other DNA
gaagctggaggaggaagggctcgcacacatcaaccggtgg

SEQ ID NO: 2731 - DNA, 42 bp, synthetic construct
  misc_feature 1..42: note = Description of Artificial Sequence: Synthetic target binding site sequence
  source 1..42: mol_type = other DNA
gaagctggaggaggaagggccttccatcacatcaaccggtgg

SEQ ID NO: 2732 - DNA, 46 bp, synthetic construct
  misc_feature 1..46: note = Description of Artificial Sequence: Synthetic target binding site sequence
  source 1..46: mol_type = other DNA
gaagctggaggaggaagggcctgagtcccatcacatcaaccggtgg

SEQ ID NO: 2733 - DNA, 52 bp, synthetic construct
  misc_feature 1..52: note = Description of Artificial Sequence: Synthetic target binding site sequence
  source 1..52: mol_type = other DNA
gaagctggaggaggaagggcctgagtccgagtcccatcacatcaaccggtgg

SEQ ID NO: 2734 - DNA, 58 bp, synthetic construct
  misc_feature 1..58: note = Description of Artificial Sequence: Synthetic target binding site sequence
  source 1..58: mol_type = other DNA
gaagctggaggaggaagggcctgagtccgagcagaagtcccatcacatcaaccggtgg

SEQ ID NO: 2735 - DNA, 59 bp, synthetic construct
  misc_feature 1..59: note = Description of Artificial Sequence: Synthetic target binding site sequence
  source 1..59: mol_type = other DNA
gaagctggaggaggaagggcctgagtcctgccgtttgtagccatcacatcaaccggtgg

SEQ ID NO: 2736 - DNA, 61 bp, synthetic construct
  misc_feature 1..61: note = Description of Artificial Sequence: Synthetic target binding site sequence
  source 1..61: mol_type = other DNA
gaagctggaggaggaagggcctgagtccgagcagaagagctcccatcacatcaaccggtgg

SEQ ID NO: 2737 - DNA, 61 bp, synthetic construct
  misc_feature 1..61: note = Description of Artificial Sequence: Synthetic target binding site sequence
  source 1..61: mol_type = other DNA
gaagctggaggaggaagggcctgagtccgagcagaagaactcccatcacatcaaccggtgg

SEQ ID NO: 2738 - DNA, 64 bp, synthetic construct
  misc_feature 1..64: note = Description of Artificial Sequence: Synthetic target binding site sequence
  source 1..64: mol_type = other DNA
gaagctggaggaggaagggcctgagtccgagcagaagaagggctcccatcacatcaaccggtgg

SEQ ID NO: 2739 - DNA, 65 bp, synthetic construct
  misc_feature 1..65: note = Description of Artificial Sequence: Synthetic target binding site sequence
  source 1..65: mol_type = other DNA
gaagctggaggaggaagggcctgagtccgagcagaagaaagggctcccatcacatcaaccggtgg

SEQ ID NO: 2740 - DNA, 67 bp, synthetic construct
  misc_feature 1..67: note = Description of Artificial Sequence: Synthetic target binding site sequence
  source 1..67: mol_type = other DNA
gaagctggaggaggaagggcctgagtccgagcagaagaacagaagggctcccatcacatcaaccggt

SEQ ID NO: 2741 - DNA, 67 bp, synthetic construct; identical to SEQ ID NO: 2722
  misc_feature 1..67: note = Description of Artificial Sequence: Synthetic target binding site sequence
  source 1..67: mol_type = other DNA

SEQ ID NO: 2742 - DNA, 31 bp, synthetic construct
  misc_feature 1..31: note = Description of Artificial Sequence: Synthetic target binding site sequence
  source 1..31: mol_type = other DNA
gaagctggaggaggaagggcctgagtccgag

SEQ ID NO: 2743 - DNA, 11 bp, synthetic construct
  misc_feature 1..11: note = Description of Artificial Sequence: Synthetic target binding site sequence
  source 1..11: mol_type = other DNA
gaagctggagg

SEQ ID NO: 2744 - DNA, 11 bp, synthetic construct
  misc_feature 1..11: note = Description of Artificial Sequence: Synthetic target binding site sequence
  source 1..11: mol_type = other DNA
gaagctggagg

SEQ ID NO: 2745 - DNA, 28 bp, synthetic construct
  misc_feature 1..28: note = Description of Artificial Sequence: Synthetic target binding site sequence
  source 1..28: mol_type = other DNA
gaagctggaggaggaagggcctgagtgg

SEQ ID NO: 2746 - DNA, 41 bp, synthetic construct
  misc_feature 1..41: note = Description of Artificial Sequence: Synthetic target binding site sequence
  source 1..41: mol_type = other DNA
gaagctggaggaggaagggctcccatcacatcaaccggtgg

SEQ ID NO: 2747 - DNA, 45 bp, synthetic construct
  misc_feature 1..45: note = Description of Artificial Sequence: Synthetic target binding site sequence
  source 1..45: mol_type = other DNA
gaagctggaggaggaagggcctgagtccatcacatcaaccggtgg

SEQ ID NO: 2748 - DNA, 46 bp, synthetic construct; identical to SEQ ID NO: 2732
  misc_feature 1..46: note = Description of Artificial Sequence: Synthetic target binding site sequence
  source 1..46: mol_type = other DNA

SEQ ID NO: 2749 - DNA, 49 bp, synthetic construct
  misc_feature 1..49: note = Description of Artificial Sequence: Synthetic target binding site sequence
  source 1..49: mol_type = other DNA
gaagctggaggaggaagggcctgagtccgagcatcacatcaaccggtgg

SEQ ID NO: 2750 - DNA, 53 bp, synthetic construct
  misc_feature 1..53: note = Description of Artificial Sequence: Synthetic target binding site sequence
  source 1..53: mol_type = other DNA
gaagctggaggaggaagggcctgagtccgagctcccatcacatcaaccggtgg

SEQ ID NO: 2751 - DNA, 61 bp, synthetic construct
  misc_feature 1..61: note = Description of Artificial Sequence: Synthetic target binding site sequence
  source 1..61: mol_type = other DNA
gaagctggaggaggaagggcctgagtccgagcagaagggctcccatcacatcaaccggtgg

SEQ ID NO: 2752 - DNA, 64 bp, synthetic construct; identical to SEQ ID NO: 2738
  misc_feature 1..64: note = Description of Artificial Sequence: Synthetic target binding site sequence
  source 1..64: mol_type = other DNA

SEQ ID NO: 2753 - DNA, 65 bp, synthetic construct
  misc_feature 1..65: note = Description of Artificial Sequence: Synthetic target binding site sequence
  source 1..65: mol_type = other DNA
gaagctggaggaggaagggcctgagtccgagcagaaagaagggctcccatcacatcaaccggtgg

SEQ ID NO: 2754 - DNA, 67 bp, synthetic construct; identical to SEQ ID NO: 2740
  misc_feature 1..67: note = Description of Artificial Sequence: Synthetic target binding site sequence
  source 1..67: mol_type = other DNA

SEQ ID NO: 2755 - DNA, 97 bp, synthetic construct
  misc_feature 1..97: note = Description of Artificial Sequence: Synthetic VEGFA target binding site sequence
  source 1..97: mol_type = other DNA
aggtcagaaatagggggtccaggagcaaactccccccaccccctttccaaagcccattccctctttagccagagccggggtgtgcagacggcagtca

SEQ ID NO: 2756 - DNA, 97 bp, synthetic construct
  misc_feature 1..97: note = Description of Artificial Sequence: Synthetic VEGFA target binding site sequence
  source 1..97: mol_type = other DNA
tgactgccgtctgcacaccccggctctggctaaagagggaatgggctttggaaagggggtggggggagtttgctcctggaccccctatttctgacct

SEQ ID NO: 2757 - DNA, 23 bp, synthetic construct
  misc_feature 1..23: note = Description of Artificial Sequence: Synthetic VEGFA target binding site sequence
  source 1..23: mol_type = other DNA
gggtggggggagtttgctcctgg

SEQ ID NO: 2758 - DNA, 23 bp, synthetic construct
  misc_feature 1..23: note = Description of Artificial Sequence: Synthetic VEGFA target binding site sequence
  source 1..23: mol_type = other DNA
tagtggagggagcttgctcctgg

SEQ ID NO: 2759 - DNA, 23 bp, synthetic construct
  misc_feature 1..23: note = Description of Artificial Sequence: Synthetic VEGFA target binding site sequence
  source 1..23: mol_type = other DNA
tagtggagggagcttgctcctgg

SEQ ID NO: 2760 - DNA, 21 bp, synthetic construct
  misc_feature 1..21: note = Description of Artificial Sequence: Synthetic VEGFA target binding site sequence
  source 1..21: mol_type = other DNA
gtggagggagcttgctcctgg

SEQ ID NO: 2761 - DNA, 67 bp, synthetic construct
  misc_feature 1..67: note = Description of Artificial Sequence: Synthetic VEGFA target binding site sequence
  source 1..67: mol_type = other DNA
tagctgtttgggaggtcagaaatagggggtccaggagcaaactccccccaccccctttccaaagccc

SEQ ID NO: 2762 - skipped

SEQ ID NO: 2763 - DNA, 14 bp, synthetic construct
  misc_feature 1..14: note = Description of Artificial Sequence: Synthetic VEGFA target binding site sequence
  source 1..14: mol_type = other DNA
cctttccaaagccc

SEQ ID NO: 2764 - skipped

SEQ ID NO: 2765 - DNA, 22 bp, synthetic construct
  misc_feature 1..22: note = Description of Artificial Sequence: Synthetic VEGFA target binding site sequence
  source 1..22: mol_type = other DNA
ccccaccccctttccaaagccc

SEQ ID NO: 2766 - DNA, 18 bp, synthetic construct
  misc_feature 1..18: note = Description of Artificial Sequence: Synthetic VEGFA target binding site sequence
  source 1..18: mol_type = other DNA
tagctgtttccaaagccc

SEQ ID NO: 2767 - DNA, 18 bp, synthetic construct
  misc_feature 1..18: note = Description of Artificial Sequence: Synthetic VEGFA target binding site sequence
  source 1..18: mol_type = other DNA
tagccctttccaaagccc

SEQ ID NO: 2768 - DNA, 20 bp, synthetic construct
  misc_feature 1..20: note = Description of Artificial Sequence: Synthetic VEGFA target binding site sequence
  source 1..20: mol_type = other DNA
tagctgtttgggaggtcaga

SEQ ID NO: 2769 - DNA, 24 bp, synthetic construct
  misc_feature 1..24: note = Description of Artificial Sequence: Synthetic VEGFA target binding site sequence
  source 1..24: mol_type = other DNA
tagctgttcccctttccaaagccc

SEQ ID NO: 2770 - DNA, 28 bp, synthetic construct
  misc_feature 1..28: note = Description of Artificial Sequence: Synthetic VEGFA target binding site sequence
  source 1..28: mol_type = other DNA
tagctgtttgggaggtcagaaatagccc

SEQ ID NO: 2771 - DNA, 29 bp, synthetic construct
  misc_feature 1..29: note = Description of Artificial Sequence: Synthetic VEGFA target binding site sequence
  source 1..29: mol_type = other DNA
tagctgtttgggtggcctttccaaagccc

SEQ ID NO: 2772 - DNA, 34 bp, synthetic construct
  misc_feature 1..34: note = Description of Artificial Sequence: Synthetic VEGFA target binding site sequence
  source 1..34: mol_type = other DNA
tagctgtttgggaggtcagaaataggcaaagccc

SEQ ID NO: 2773 - DNA, 35 bp, synthetic construct
  misc_feature 1..35: note = Description of Artificial Sequence: Synthetic VEGFA target binding site sequence
  source 1..35: mol_type = other DNA
tagctgtttgggaggtcaccccctttccaaagccc

SEQ ID NO: 2774 - DNA, 37 bp, synthetic construct
  misc_feature 1..37: note = Description of Artificial Sequence: Synthetic VEGFA target binding site sequence
  misc_difference 31: note = a, c, t, g, unknown or other
  source 1..37: mol_type = other DNA
tagctgtttctgacctcccaccccctttccnaagccc

SEQ ID NO: 2775 - DNA, 39 bp, synthetic construct
  misc_feature 1..39: note = Description of Artificial Sequence: Synthetic VEGFA target binding site sequence
  misc_difference 36: note = a, c, t, g, unknown or other
  source 1..39: mol_type = other DNA
tagctgtttgggaggtcagaaatagggggtccaganccc

SEQ ID NO: 2776 - DNA, 41 bp, synthetic construct
  misc_feature 1..41: note = Description of Artificial Sequence: Synthetic VEGFA target binding site sequence
  source 1..41: mol_type = other DNA
tagctgtttgggaggtcagaaataccccctttccaaagccc

SEQ ID NO: 2777 - DNA, 45 bp, synthetic construct
  misc_feature 1..45: note = Description of Artificial Sequence: Synthetic VEGFA target binding site sequence
  source 1..45: mol_type = other DNA
tagctgtttgggaggtcagaaatagggggtccctttccaaagccc

SEQ ID NO: 2778 - DNA, 48 bp, synthetic construct
  misc_feature 1..48: note = Description of Artificial Sequence: Synthetic VEGFA target binding site sequence
  source 1..48: mol_type = other DNA
tagctgtttgggaggtcagaaactccccccaccccctttccaaagccc

SEQ ID NO: 2779 - DNA, 50 bp, synthetic construct
  misc_feature 1..50: note = Description of Artificial Sequence: Synthetic VEGFA target binding site sequence
  source 1..50: mol_type = other DNA
tagctgtttgggaggtcagaaatagggggtccaccccctttccaaagccc

SEQ ID NO: 2780 - DNA, 51 bp, synthetic construct
  misc_feature 1..51: note = Description of Artificial Sequence: Synthetic VEGFA target binding site sequence
  source 1..51: mol_type = other DNA
tagctgtttgggaggtcagaaatagggggtcccaccccctttccaaagccc

SEQ ID NO: 2781 - DNA, 52 bp, synthetic construct
  misc_feature 1..52: note = Description of Artificial Sequence: Synthetic VEGFA target binding site sequence
  misc_difference 35: note = a, c, t, g, unknown or other
  misc_difference 46: note = a, c, t, g, unknown or other
  misc_difference 49: note = a, c, t, g, unknown or other
  source 1..52: mol_type = other DNA
tagctgtttgggaggtcagaaatagggtccccccnccccctttccnaanccc

SEQ ID NO: 2782 - DNA, 52 bp, synthetic construct
  misc_feature 1..52: note = Description of Artificial Sequence: Synthetic VEGFA target binding site sequence
  source 1..52: mol_type = other DNA
tagctgtttgggaggtcagaagcaaactccccccaccccctttccaaagccc

SEQ ID NO: 2783 - DNA, 52 bp, synthetic construct
  misc_feature 1..52: note = Description of Artificial Sequence: Synthetic VEGFA target binding site sequence
  source 1..52: mol_type = other DNA
tagctgtttgggaggtcagaaataaactccccccaccccctttccaaagccc

SEQ ID NO: 2784 - DNA, 53 bp, synthetic construct
  misc_feature 1..53: note = Description of Artificial Sequence: Synthetic VEGFA target binding site sequence
  misc_difference 1: note = a, c, t, g, unknown or other
  misc_difference 7: note = a, c, t, g, unknown or other
  misc_difference 16: note = a, c, t, g, unknown or other
  misc_difference 18..19: note = a, c, t, g, unknown or other
  misc_difference 21..22: note = a, c, t, g, unknown or other
  misc_difference 50: note = a, c, t, g, unknown or other
  source 1..53: mol_type = other DNA
nagctgnttgggaggncnnanngcaaactccccccaccccctttccaaanccc

SEQ ID NO: 2785 - DNA, 53 bp, synthetic construct
  misc_feature 1..53: note = Description of Artificial Sequence: Synthetic VEGFA target binding site sequence
  source 1..53: mol_type = other DNA
tagctgtttgggaggtcagaaatagggggtcccccaccccctttccaaagccc

SEQ ID NO: 2786 - DNA, 54 bp, synthetic construct
  misc_feature 1..54: note = Description of Artificial Sequence: Synthetic VEGFA target binding site sequence
  source 1..54: mol_type = other DNA
tagctgtttgggaggtcagaaatagggggtccacccaccccctttccaaagccc

SEQ ID NO: 2787 - DNA, 55 bp, synthetic construct
  misc_feature 1..55: note = Description of Artificial Sequence: Synthetic VEGFA target binding site sequence
  source 1..55: mol_type = other DNA
tagctgtttgggaggtcagaaatagcaaactccccccaccccctttccaaagccc

SEQ ID NO: 2788 - DNA, 58 bp, synthetic construct
  misc_feature 1..58: note = Description of Artificial Sequence: Synthetic VEGFA target binding site sequence
  source 1..58: mol_type = other DNA
tagctgtttgggaggtcagaaatagggggtccaggaccccaccccctttccaaagccc

SEQ ID NO: 2789 - DNA, 60 bp, synthetic construct
  misc_feature 1..60: note = Description of Artificial Sequence: Synthetic VEGFA target binding site sequence
  source 1..60: mol_type = other DNA
tagctgtttgggaggtcagaaatagggggtccaactccccccaccccctttccaaagccc

SEQ ID NO: 2790 - DNA, 61 bp, synthetic construct
  misc_feature 1..61: note = Description of Artificial Sequence: Synthetic VEGFA target binding site sequence
  source 1..61: mol_type = other DNA
tagctgtttgggaggtcagaaatagggggtccaccccctttccaccccctttccaaagccc

SEQ ID NO: 2791 - DNA, 62 bp, synthetic construct
  misc_feature 1..62: note = Description of Artificial Sequence: Synthetic VEGFA target binding site sequence
  source 1..62: mol_type = other DNA
tagctgtttgggaggtcagaaatagggggtccaggactccccccaccccctttccaaagccc

SEQ ID NO: 2792 - DNA, 63 bp, synthetic construct
  misc_feature 1..63: note = Description of Artificial Sequence: Synthetic VEGFA target binding site sequence
  source 1..63: mol_type = other DNA
tagctgtttgggaggtcagaaatagggggtccaggaactccccccaccccctttccaaagccc

SEQ ID NO: 2793 - DNA, 64 bp, synthetic construct
  misc_feature 1..64: note = Description of Artificial Sequence: Synthetic VEGFA target binding site sequence
  source 1..64: mol_type = other DNA
tagctgtttgggaggtcagaaatagggggtccagcaaactccccccaccccctttccaaagccc

SEQ ID NO: 2794 - DNA, 65 bp, synthetic construct
  misc_feature 1..65: note = Description of Artificial Sequence: Synthetic VEGFA target binding site sequence
  source 1..65: mol_type = other DNA
tagctgtttgggaggtcagaaatagggggtccaggcaaactccccccaccccctttccaaagccc

SEQ ID NO: 2795 - DNA, 258 bp, synthetic construct
  misc_feature 1..258: note = Description of Artificial Sequence: Synthetic VEGFA target binding site sequence
  misc_difference 197: note = a, c, t, g, unknown or other
  source 1..258: mol_type = other DNA
tagctgtttgggaggtcagaaatagggggtccaggagtgctagatcttcatctaaagacatttctgagaaaaatgtatctgttttctttcagaagaaatttacacttaatagatattatggtaactaaagtaaggcagataattttggccatcagcttatattgtgggataatctctttttgctgaccttgaaaagntgtggcatattcacaacaagtaggaaaattgcaaactccccccaccccctttccaaagccc

SEQ ID NO: 2796 - DNA, 67 bp, synthetic construct
  misc_feature 1..67: note = Description of Artificial Sequence: Synthetic VEGFA target binding site sequence
  source 1..67: mol_type = other DNA
tgggaggtcagaaatagggggtccaggagcaaactccccccaccccctttccaaagcccattccctc

SEQ ID NO: 2797 - DNA, 28 bp, synthetic construct
  misc_feature 1..28: note = Description of Artificial Sequence: Synthetic VEGFA target binding site sequence
  source 1..28: mol_type = other DNA
tgggaggtcagaaatagggggtccagga

SEQ ID NO: 2798 - DNA, 27 bp, synthetic construct
  misc_feature 1..27: note = Description of Artificial Sequence: Synthetic VEGFA target binding site sequence
  source 1..27: mol_type = other DNA
caccctctttccaaagcccattccctc

SEQ ID NO: 2799 - DNA, 38 bp, synthetic construct
  misc_feature 1..38: note = Description of Artificial Sequence: Synthetic VEGFA target binding site sequence
  source 1..38: mol_type = other DNA
caaactccccccaccccctttccaaagcccattccctc

SEQ ID NO: 2800 - DNA, 14 bp, synthetic construct
  misc_feature 1..14: note = Description of Artificial Sequence: Synthetic VEGFA target binding site sequence
  source 1..14: mol_type = other DNA
aagcccattccctc

SEQ ID NO: 2801 - skipped

SEQ ID NO: 2802 - DNA, 19 bp, synthetic construct
  misc_feature 1..19: note = Description of Artificial Sequence: Synthetic VEGFA target binding site sequence
  source 1..19: mol_type = other DNA
ttccaaagcccattccctc

SEQ ID NO: 2803 - skipped

SEQ ID NO: 2804 - DNA, 29 bp, synthetic construct
  misc_feature 1..29: note = Description of Artificial Sequence: Synthetic VEGFA target binding site sequence
  source 1..29: mol_type = other DNA
cccaccccctttccaaagcccattccctc

SEQ ID NO: 2805 - DNA, 29 bp, synthetic construct
  misc_feature 1..29: note = Description of Artificial Sequence: Synthetic VEGFA target binding site sequence
  source 1..29: mol_type = other DNA
cccaccccctttccaaagcccattccctc

SEQ ID NO: 2806 - DNA, 28 bp, synthetic construct
  misc_feature 1..28: note = Description of Artificial Sequence: Synthetic VEGFA target binding site sequence
  source 1..28: mol_type = other DNA
tgggcccctttccaaagcccattccctc

SEQ ID NO: 2807 - DNA, 31 bp, synthetic construct
  misc_feature 1..31: note = Description of Artificial Sequence: Synthetic VEGFA target binding site sequence
  source 1..31: mol_type = other DNA
tgggagccccctttccaaagcccattccctc

SEQ ID NO: 2808 - DNA, 41 bp, synthetic construct
  misc_feature 1..41: note = Description of Artificial Sequence: Synthetic VEGFA target binding site sequence
  source 1..41: mol_type = other DNA
tgggaggtcagaaacaccccctttccaaagcccattccctc

SEQ ID NO: 2809 - DNA, 47 bp, synthetic construct
  misc_feature 1..47: note = Description of Artificial Sequence: Synthetic VEGFA target binding site sequence
  source 1..47: mol_type = other DNA
tgggaggtcagaaatagggggtccccctttccaaagcccattccctc

SEQ ID NO: 2810 - DNA, 50 bp, synthetic construct
  misc_feature 1..50: note = Description of Artificial Sequence: Synthetic VEGFA target binding site sequence
  misc_difference 36: note = a, c, t, g, unknown or other
  source 1..50: mol_type = other DNA
tgggaggtcagaaaaactccccccaccccctttccnaagcccattccctc

SEQ ID NO: 2811 - DNA, 50 bp, synthetic construct
  misc_feature 1..50: note = Description of Artificial Sequence: Synthetic VEGFA target binding site sequence
  source 1..50: mol_type = other DNA
tgggaggtcagaaatagggggtccaccccctttccaaagcccattccctc

SEQ ID NO: 2812 - DNA, 51 bp, synthetic construct
  misc_feature 1..51: note = Description of Artificial Sequence: Synthetic VEGFA target binding site sequence
  source 1..51: mol_type = other DNA
tgggaggtcagaaatagggggtcccaccccctttccaaagcccattccctc

SEQ ID NO: 2813 - DNA, 51 bp, synthetic construct
  misc_feature 1..51: note = Description of Artificial Sequence: Synthetic VEGFA target binding site sequence
  source 1..51: mol_type = other DNA
tgggaggtcagaaataggtccccccaccccctttccaaagcccattccctc

SEQ ID NO: 2814 - DNA, 52 bp, synthetic construct
  misc_feature 1..52: note = Description of Artificial Sequence: Synthetic VEGFA target binding site sequence
  misc_difference 3: note = a, c, t, g, unknown or other
  source 1..52: mol_type = other DNA
tgngaggtcagaagcaaactccccccaccccctttccaaagcccattccctc

SEQ ID NO: 2815 - DNA, 52 bp, synthetic construct
  misc_feature 1..52: note = Description of Artificial Sequence: Synthetic VEGFA target binding site sequence
  source 1..52: mol_type = other DNA
tgggaggtcagaaatagggggtccccaccccctttccaaagcccattccctc

SEQ ID NO: 2816 - DNA, 54 bp, synthetic construct
  misc_feature 1..54: note = Description of Artificial Sequence: Synthetic VEGFA target binding site sequence
  source 1..54: mol_type = other DNA
tgggaggtcagaaatagggggtccccccaccccctttccaaagcccattccctc

SEQ ID NO: 2817 - DNA, 55 bp, synthetic construct
  misc_feature 1..55: note = Description of Artificial Sequence: Synthetic VEGFA target binding site sequence
  source 1..55: mol_type = other DNA
tgggaggtcagaaatagggggtccaggacaccccctttccaaagcccattccctc

SEQ ID NO: 2818 - DNA, 56 bp, synthetic construct
  misc_feature 1..56: note = Description of Artificial Sequence: Synthetic VEGFA target binding site sequence
  source 1..56: mol_type = other DNA
tgggaggtcagaaataggcaaactccccccaccccctttccaaagcccattccctc

SEQ ID NO: 2819 - DNA, 58 bp, synthetic construct
  misc_feature 1..58: note = Description of Artificial Sequence: Synthetic VEGFA target binding site sequence
  source 1..58: mol_type = other DNA
tgggaggtcagaaatagggggtccaggaccccaccccctttccaaagcccattccctc

SEQ ID NO: 2820 - DNA, 59 bp, synthetic construct
  misc_feature 1..59: note = Description of Artificial Sequence: Synthetic VEGFA target binding site sequence
  misc_difference 28: note = a, c, t, g, unknown or other
  source 1..59: mol_type = other DNA
tgggaggtcagaaatagggggtccaggncccccaccccctttccaaagcccattccctc

SEQ ID NO: 2821 - DNA, 60 bp, synthetic construct
  misc_feature 1..60: note = Description of Artificial Sequence: Synthetic VEGFA target binding site sequence
  source 1..60: mol_type = other DNA
tgggaggtcagaaatagggggtccagctggccccaccccctttccaaagcccattccctc

SEQ ID NO: 2822 - DNA, 61 bp, synthetic construct
  misc_feature 1..61: note = Description of Artificial Sequence: Synthetic VEGFA target binding site sequence
  source 1..61: mol_type = other DNA
tgggaggtcagaaatagggggtccaaactccccccaccccctttccaaagcccattccctc

SEQ ID NO: 2823 - DNA, 61 bp, synthetic construct
  misc_feature 1..61: note = Description of Artificial Sequence: Synthetic VEGFA target binding site sequence
  misc_difference 11: note = a, c, t, g, unknown or other
  source 1..61: mol_type = other DNA
tgggaggtcanaaatagggggtccagactccccccaccccctttccaaagcccattccctc

SEQ ID NO: 2824 - DNA, 62 bp, synthetic construct
  misc_feature 1..62: note = Description of Artificial Sequence: Synthetic VEGFA target binding site sequence
  source 1..62: mol_type = other DNA
tgggaggtcagaaatagggggtccaggactccccccaccccctttccaaagcccattccctc

SEQ ID NO: 2825 - DNA, 64 bp, synthetic construct
  misc_feature 1..64: note = Description of Artificial Sequence: Synthetic VEGFA target binding site sequence
  misc_difference 48..53: note = a, c, t, g, unknown or other
  misc_difference 60..62: note = a, c, t, g, unknown or other
  source 1..64: mol_type = other DNA
tgggaggtcagaaatagggggtccagcaaactccccccaccccctttnnnnnncccattnnntc

SEQ ID NO: 2826 - DNA, 65 bp, synthetic construct
  misc_feature 1..65: note = Description of Artificial Sequence: Synthetic VEGFA target binding site sequence
  misc_difference 3: note = a, c, t, g, unknown or other
  source 1..65: mol_type = other DNA
tgngaggtcagaaatagggggtccaggaaaactccccccaccccctttccaaagcccattccctc

SEQ ID NO: 2827 - DNA, 44 bp, synthetic construct
  misc_feature 1..44: note = Description of Artificial Sequence: Synthetic VEGFA target binding site sequence
  source 1..44: mol_type = other DNA
tgggaggtcaccccctttccaaagcccaccccctttccaaagcc

SEQ ID NO: 2828 - DNA, 67 bp, synthetic construct
  misc_feature 1..67: note = Description of Artificial Sequence: Synthetic VEGFA target binding site sequence
  source 1..67: mol_type = other DNA
tgggaggtcagaaatagggggtccaggaaagcaaactccccccaccccctttccaaagcccattccc

SEQ ID NO: 2829 - DNA, 67 bp, synthetic construct
  misc_feature 1..67: note = Description of Artificial Sequence: Synthetic VEGFA target binding site sequence
  source 1..67: mol_type = other DNA
gaggacgtgtgtgtctgtgtgggtgagtgagtgtgtgcgtgtggggttgagggtgttggagcgggga

SEQ ID NO: 2830 - DNA, 21 bp, synthetic construct
  misc_feature 1..21: note = Description of Artificial Sequence: Synthetic VEGFA target binding site sequence
  source 1..21: mol_type = other DNA
gaggacgtgtgtgtctgtgtg

SEQ ID NO: 2831 - DNA, 17 bp, synthetic construct
  misc_feature 1..17: note = Description of Artificial Sequence: Synthetic VEGFA target binding site sequence
  source 1..17: mol_type = other DNA
gaggacgtgtgtgttgg

SEQ ID NO: 2832 - DNA, 21 bp, synthetic construct
  misc_feature 1..21: note = Description of Artificial Sequence: Synthetic VEGFA target binding site sequence
  source 1..21: mol_type = other DNA
gaggacgtgtgtgtctgtgtg

SEQ ID NO: 2833 - DNA, 21 bp, synthetic construct
  misc_feature 1..21: note = Description of Artificial Sequence: Synthetic VEGFA target binding site sequence
  source 1..21: mol_type = other DNA
gaggacgtgtgtgtctgtgtg

SEQ ID NO: 2834 - DNA, 37 bp, synthetic construct
  misc_feature 1..37: note = Description of Artificial Sequence: Synthetic VEGFA target binding site sequence
  source 1..37: mol_type = other DNA
gaggacgtgtgtgtctgtgtgggtgagtgagtgtgtg

SEQ ID NO: 2835 - DNA, 29 bp, synthetic construct
  misc_feature 1..29: note = Description of Artificial Sequence: Synthetic VEGFA target binding site sequence
  source 1..29: mol_type = other DNA
gaggacgtgtgtgtctgtgtgggtgagtg

SEQ ID NO: 2836 - DNA, 28 bp, synthetic construct
  misc_feature 1..28: note = Description of Artificial Sequence: Synthetic VEGFA target binding site sequence
  source 1..28: mol_type = other DNA
gaggacgtgtgtgtctgtgtgagtggga

SEQ ID NO: 2837 - DNA, 37 bp, synthetic construct
  misc_feature 1..37: note = Description of Artificial Sequence: Synthetic VEGFA target binding site sequence
  misc_difference 35..36: note = a, c, t, g, unknown or other
  source 1..37: mol_type = other DNA
gaggacgtgtgtgtctgtgtgggtgagtgagtgtnng

SEQ ID NO: 2838 - DNA, 37 bp, synthetic construct
  misc_feature 1..37: note = Description of Artificial Sequence: Synthetic VEGFA target binding site sequence
  misc_difference 32: note = a, c, t, g, unknown or other
  misc_difference 34: note = a, c, t, g, unknown or other
  misc_difference 37: note = a, c, t, g, unknown or other
  source 1..37: mol_type = other DNA
gaggacgtgtgtgtctgtgtgggtgagtgagngnggn

SEQ ID NO: 2839 - DNA, 42 bp, synthetic construct
  misc_feature 1..42: note = Description of Artificial Sequence: Synthetic VEGFA target binding site sequence
  source 1..42: mol_type = other DNA
gaggacgtgtgtgtctgtgtgggtgagtgagtggggcgggga

SEQ ID NO: 2840 - DNA, 44 bp, synthetic construct
  misc_feature 1..44: note = Description of Artificial Sequence: Synthetic VEGFA target binding site sequence
  source 1..44: mol_type = other DNA
gaggacgtgtgtgtctgtgtgggtgagtgagtgtggagcgggga

SEQ ID NO: 2841 - DNA, 45 bp, synthetic construct
  misc_feature 1..45: note = Description of Artificial Sequence: Synthetic VEGFA target binding site sequence
  source 1..45: mol_type = other DNA
gaggacgtgtgtgtctgtgtgggtgagtgagtgttggagcgggga

SEQ ID NO: 2842 - DNA, 47 bp, synthetic construct
  misc_feature 1..47: note = Description of Artificial Sequence: Synthetic VEGFA target binding site sequence
  source 1..47: mol_type = other DNA
gaggacgtgtgtgtctgtgtgggtgagtgagtgtgttggagcgggga

SEQ ID NO: 2843 - DNA, 47 bp, synthetic construct
  misc_feature 1..47: note = Description of Artificial Sequence: Synthetic VEGFA target binding site sequence
  source 1..47: mol_type = other DNA
gaggacgtgtgtgtctgtgtgggtgagtgagggtgttggagcgggga

SEQ ID NO: 2844 - DNA, 49 bp, synthetic construct
  misc_feature 1..49: note = Description of Artificial Sequence: Synthetic VEGFA target binding site sequence
  source 1..49: mol_type = other DNA
gaggacgtgtgtgtctgtgtgggtgagtgagtgggcgttggagcgggga

SEQ ID NO: 2845 - DNA, 55 bp, synthetic construct
  misc_feature 1..55: note = Description of Artificial Sequence: Synthetic VEGFA target binding site sequence
  misc_difference 27..28: note = a, c, t, g, unknown or other
  source 1..55: mol_type = other DNA
gaggacgtgtgtgtctgtgtgggtganngtggggttgagggtgttggagcgggga

SEQ ID NO: 2846 - DNA, 59 bp, synthetic construct
  misc_feature 1..59: note = Description of Artificial Sequence: Synthetic VEGFA target binding site sequence
  source 1..59: mol_type = other DNA
gaggacgtgtgtgtctgtgtgggtgagtgagtgtggggttgagggcgttggagcgggga

SEQ ID NO: 2847 - DNA, 60 bp, synthetic construct
  misc_feature 1..60: note = Description of Artificial Sequence: Synthetic VEGFA target binding site sequence
  source 1..60: mol_type = other DNA
gaggacgtgtgtgtctgtgtgggtgagtgagtgtgtgggttgagggcgttggagcgggga

SEQ ID NO: 2848 - DNA, 60 bp, synthetic construct
  misc_feature 1..60: note = Description of Artificial Sequence: Synthetic VEGFA target binding site sequence
  source 1..60: mol_type = other DNA
gaggacgtgtgtgtctgtgtggtgagtgagtgtgtggggttgagggtgttggagcgggga

SEQ ID NO: 2849 - DNA, 61 bp, synthetic construct
  misc_feature 1..61: note = Description of Artificial Sequence: Synthetic VEGFA target binding site sequence
  misc_difference 34: note = a, c, t, g, unknown or other
  source 1..61: mol_type = other DNA
gaggacgtgtgtgtctgtgtgggtgagtgagtgngtggggttgagggtgttggagcgggga

SEQ ID NO: 2850 - DNA, 63 bp, synthetic construct
  misc_feature 1..63: note = Description of Artificial Sequence: Synthetic VEGFA target binding site sequence
  source 1..63: mol_type = other DNA
gaggacgtgtgtgtctgtgtgggtgagtgagtgtgtgtggggttgagggtgttggagcgggga

SEQ ID NO: 2851 - DNA, 64 bp, synthetic construct
  misc_feature 1..64: note = Description of Artificial Sequence: Synthetic VEGFA target binding site sequence
  source 1..64: mol_type = other DNA
gaggacgtgtgtgtctgtgtgggtgagtgagtgtgtgctggggttgagggtgttggagcgggga

SEQ ID NO: 2852 - DNA, 67 bp, synthetic construct
  misc_feature 1..67: note = Description of Artificial Sequence: Synthetic VEGFA target binding site sequence
  misc_difference 6: note = a, c, t, g, unknown or other
  misc_difference 8: note = a, c, t, g, unknown or other
  source 1..67: mol_type = other DNA
gaggangngtgtgtctgtgtgggtgagtgagtgtgtgtgggtgagtgagtgtgtgtctgtggggttg

SEQ ID NO: 2853 - DNA, 67 bp, synthetic construct
  misc_feature 1..67: note = Description of Artificial Sequence: Synthetic VEGFA target binding site sequence
  source 1..67: mol_type = other DNA
gaggacgtgtgtgtctgtgtgggtgagtgagtgtgtgcgtcgtgtggggttgagggtgttggagcgg

SEQ ID NO: 2854 - DNA, 67 bp, synthetic construct
  misc_feature 1..67: note = Description of Artificial Sequence: Synthetic VEGFA target binding site sequence
  source 1..67: mol_type = other DNA
gaggacgtgtgtgtctgtgtgggtgagtgagtgtgtgcaaagtgtggggttgagggtgttggagcgg

SEQ ID NO: 2855 - DNA, 67 bp, synthetic construct
  misc_feature 1..67: note = Description of Artificial Sequence: Synthetic VEGFA target binding site sequence
  source 1..67: mol_type = other DNA
gaggacgtgtgtgtctgtgtgggtgagtgagtgtgtgcgtgtgcggggttgagggtgttggagcggg

SEQ ID NO: 2856 - DNA, 67 bp, synthetic construct
  misc_feature 1..67: note = Description of Artificial Sequence: Synthetic VEGFA target binding site sequence
  source 1..67: mol_type = other DNA
tgaggacgtgtgtgtctgtgtgggtgagtgagtgtgtgcgtgtggggttgagggtgttggagcgggg

SEQ ID NO: 2857 - DNA, 21 bp, synthetic construct
  misc_feature 1..21: note = Description of Artificial Sequence: Synthetic VEGFA target binding site sequence
  source 1..21: mol_type = other DNA
gggaggtcagaaatagggggt

SEQ ID NO: 2858 - DNA, 38 bp, synthetic construct
  misc_feature 1..38: note = Description of Artificial Sequence: Synthetic VEGFA target binding site sequence
  source 1..38: mol_type = other DNA
tgaggacgtgtgtgtctgtgtgggtgagtgagtgtgtg

SEQ ID NO: 2859 - DNA, 15 bp, synthetic construct
  misc_feature 1..15: note = Description of Artificial Sequence: Synthetic VEGFA target binding site sequence
  source 1..15: mol_type = other DNA
tgaggacgtgtgtgt

SEQ ID NO: 2860 - DNA, 38 bp, synthetic construct
  misc_feature 1..38: note = Description of Artificial Sequence: Synthetic VEGFA target binding site sequence
  misc_difference 28..29: note = a, c, t, g, unknown or other
  misc_difference 32..33: note = a, c, t, g, unknown or other
  misc_difference 35: note = a, c, t, g, unknown or other
  misc_difference 37: note = a, c, t, g, unknown or other
  source 1..38: mol_type = other DNA
tgaggacgtgtgtgtctgtgtgggagannganngngng

SEQ ID NO: 2861 - DNA, 14 bp, synthetic construct
  misc_feature 1..14: note = Description of Artificial Sequence: Synthetic VEGFA target binding site sequence
  source 1..14: mol_type = other DNA
tgaggacgtgtgtg

SEQ ID NO: 2862 - DNA, 23 bp, synthetic construct
  misc_feature 1..23: note = Description of Artificial Sequence: Synthetic VEGFA target binding site sequence
  source 1..23: mol_type = other DNA
tgaggacgtgtgtgtctgtgtgg

SEQ ID NO: 2863 - DNA, 17 bp, synthetic construct
  misc_feature 1..17: note = Description of Artificial Sequence: Synthetic VEGFA target binding site sequence
  source 1..17: mol_type = other DNA
tgaggacgtgtgtgtgg

SEQ ID NO: 2864 - DNA, 30 bp, synthetic construct
  misc_feature 1..30: note = Description of Artificial Sequence: Synthetic VEGFA target binding site sequence
  source 1..30: mol_type = other DNA
tgaggacgtgtgtgtctgtgtgggtgagtg

SEQ ID NO: 2865 - DNA, 29 bp, synthetic construct
  misc_feature 1..29: note = Description of Artificial Sequence: Synthetic VEGFA target binding site sequence
  source 1..29: mol_type = other DNA
tgaggacgtgtgtgtctgtgtgggtgagg

SEQ ID NO: 2866 - DNA, 30 bp, synthetic construct; identical to SEQ ID NO: 2864
  misc_feature 1..30: note = Description of Artificial Sequence: Synthetic VEGFA target binding site sequence
  source 1..30: mol_type = other DNA

SEQ ID NO: 2867 - DNA, 40 bp, synthetic construct
  misc_feature 1..40: note = Description of Artificial Sequence: Synthetic VEGFA target binding site sequence
  source 1..40: mol_type = other DNA
tgaggacgtgtgtgtctgtgtgggtgagtgaggagcgggg

SEQ ID NO: 2868 - DNA, 43 bp, synthetic construct
  misc_feature 1..43: note = Description of Artificial Sequence: Synthetic VEGFA target binding site sequence
  source 1..43: mol_type = other DNA
tgaggacgtgtgtgtctgtgtgggtgagtgagttggagcgggg

SEQ ID NO: 2869 - DNA, 43 bp, synthetic construct
  misc_feature 1..43: note = Description of Artificial Sequence: Synthetic VEGFA target binding site sequence
  source 1..43: mol_type = other DNA
tgaggacgtgtgtgtctgtgtgggtgagtgtgttggagcgggg

SEQ ID NO: 2870 - DNA, 45 bp, synthetic construct
  misc_feature 1..45: note = Description of Artificial Sequence: Synthetic VEGFA target binding site sequence
  source 1..45: mol_type = other DNA
tgaggacgtgtgtgtctgtgtggggttgagggcgttggagcgggg

SEQ ID NO: 2871 - DNA, 45 bp, synthetic construct
  misc_feature 1..45: note = Description of Artificial Sequence: Synthetic VEGFA target binding site sequence
  source 1..45: mol_type = other DNA
tgaggacgtgtgtgtctgtgtgggtgagtgagtgttggagcgggg

SEQ ID NO: 2872 - DNA, 47 bp, synthetic construct
  misc_feature 1..47: note = Description of Artificial Sequence: Synthetic VEGFA target binding site sequence
  source 1..47: mol_type = other DNA
tgaggacgtgtgtgtctgtgtgggtgagtgagtgtgttggagcgggg

SEQ ID NO: 2873 - DNA, 47 bp, synthetic construct
  misc_feature 1..47: note = Description of Artificial Sequence: Synthetic VEGFA target binding site sequence
  source 1..47: mol_type = other DNA
tgaggacgtgtgtgtctgtgtgggtgagtgagggcgttggagcgggg

SEQ ID NO: 2874 - DNA, 52 bp, synthetic construct
  misc_feature 1..52: note = Description of Artificial Sequence: Synthetic VEGFA target binding site sequence
  source 1..52: mol_type = other DNA
tgaggacgtgtgtgtctgtgtgggtgagtgagttgagggtgttggagcgggg

SEQ ID NO: 2875 - DNA, 54 bp, synthetic construct
  misc_feature 1..54: note = Description of Artificial Sequence: Synthetic VEGFA target binding site sequence
  source 1..54: mol_type = other DNA
tgaggacgtgtgtgtctgtgtgggtgagtgagtgttgagggcgttggagcgggg

SEQ ID NO: 2876 - DNA, 56 bp, synthetic construct
  misc_feature 1..56: note = Description of Artificial Sequence: Synthetic VEGFA target binding site sequence
  source 1..56: mol_type = other DNA
tgaggacgtgtgtgtctgtgtgggtgagtgagtgtgttgagggcgttggagcgggg

SEQ ID NO: 2877 - DNA, 58 bp, synthetic construct
  misc_feature 1..58: note = Description of Artificial Sequence: Synthetic VEGFA target binding site sequence
  misc_difference 30..32: note = a, c, t, g, unknown or other
  misc_difference 39..40: note = a, c, t, g, unknown or other
  misc_difference 43: note = a, c, t, g, unknown or other
  misc_difference 46: note = a, c, t, g, unknown or other
  misc_difference 51..55: note = a, c, t, g, unknown or other
  source 1..58: mol_type = other DNA
tgaggacgtgtgtgtctgtgtgggtgagtnnnggggggnnganggngttgnnnnnggg

SEQ ID NO: 2878 - DNA, 58 bp, synthetic construct
  misc_feature 1..58: note = Description of Artificial Sequence: Synthetic VEGFA target binding site sequence
  misc_difference 32..34: note = a, c, t, g, unknown or other
  misc_difference 39: note = a, c, t, g, unknown or other
  source 1..58: mol_type = other DNA
tgaggacgtgtgtgtctgtgtgggtgagtgannnggggntgagggtgttggagcgggg

SEQ ID NO: 2879 - DNA, 59 bp, synthetic construct
  misc_feature 1..59: note = Description of Artificial Sequence: Synthetic VEGFA target binding site sequence
  misc_difference 48: note = a, c, t, g, unknown or other
  misc_difference 51..56: note = a, c, t, g, unknown or other
  source 1..59: mol_type = other DNA
tgaggacgtgtgtgtctgtgtgggtgagtgagtgtggggttgaggggntgnnnnnnggg

SEQ ID NO: 2880 - DNA, 60 bp, synthetic construct
  misc_feature 1..60: note = Description of Artificial Sequence: Synthetic VEGFA target binding site sequence
  source 1..60: mol_type = other DNA
tgaggacgtgtgtgtctgtgtgggtgagtgagtgtgtgggttgagggcgttggagcgggg

SEQ ID NO: 2881 - DNA, 61 bp, synthetic construct
  misc_feature 1..61: note = Description of Artificial Sequence: Synthetic VEGFA target binding site sequence
  source 1..61: mol_type = other DNA
tgaggacgtgtgtgtctgtgtgggtgagtgagtgtgtggggttgagggtgttggagcgggg

SEQ ID NO: 2882 - DNA, 61 bp, synthetic construct
  misc_feature 1..61: note = Description of Artificial Sequence: Synthetic VEGFA target binding site sequence
  misc_difference 39: note = a, c, t, g, unknown or other
  misc_difference 42: note = a, c, t, g, unknown or other
  misc_difference 45: note = a, c, t, g, unknown or other
  misc_difference 52: note = a, c, t, g, unknown or other
  misc_difference 57..58: note = a, c, t, g, unknown or other
  source 1..61: mol_type = other DNA
tgaggacgtgtgtgtctgtgtgggtgagtgagtgtgtgnggntgnggttganggagnngga

SEQ ID NO: 2883 - DNA, 63 bp, synthetic construct
  misc_feature 1..63: note = Description of Artificial Sequence: Synthetic VEGFA target binding site sequence
  source 1..63: mol_type = other DNA
tgaggacgtgtgtgtctgtgtgggtgagtgagtgtgtgtggggttgagggtgttggagcgggg

SEQ ID NO: 2884 - DNA, 63 bp, synthetic construct
  misc_feature 1..63: note = Description of Artificial Sequence: Synthetic VEGFA target binding site sequence
  source 1..63: mol_type = other DNA
tgaggacgtgtgtgtctgtgtgggtgagtgagtgcgtgtggggttgagggtgttggagcgggg

SEQ ID NO: 2885 - DNA, 65 bp, synthetic construct
  misc_feature 1..65: note = Description of Artificial Sequence: Synthetic VEGFA target binding site sequence
  source 1..65: mol_type = other DNA
tgaggacgtgtgtgtctgtgtgggtgagtgagtgagtgtgtggggttgagggcgttggagcgggg

SEQ ID NO: 2886 - DNA, 67 bp, synthetic construct
  misc_feature 1..67: note = Description of Artificial Sequence: Synthetic VEGFA target binding site sequence
  misc_difference 43: note = a, c, t, g, unknown or other
  source 1..67: mol_type = other DNA
tgaggacgtgtgtgtctgtgtgggtgagtgagtgagtgagtgngtggggttgagggcgttggagcgg

SEQ ID NO: 2887 - DNA, 67 bp, synthetic construct
  misc_feature 1..67: note = Description of Artificial Sequence: Synthetic VEGFA target binding site sequence
  source 1..67: mol_type = other DNA
tgaggacgtgtgtgtctgtgtgggtgagtgagtgtgtgctcgtgtggggttgagggcgttggagcgg

SEQ ID NO: 2888 - DNA, 330 bp, synthetic construct
  misc_feature 1..330: note = Description of Artificial Sequence: Synthetic VEGFA target binding site oligonucleotide
  misc_difference 28: note = a, c, t, g, unknown or other
  misc_difference 30: note = a, c, t, g, unknown or other
  misc_difference 32: note = a, c, t, g, unknown or other
  misc_difference 42..44: note = a, c, t, g, unknown or other
  misc_difference 50: note = a, c, t, g, unknown or other
  misc_difference 54: note = a, c, t, g, unknown or other
  misc_difference 57..58: note = a, c, t, g, unknown or other
  misc_difference 60: note = a, c, t, g, unknown or other
  misc_difference 197: note = a, c, t, g, unknown or other
  misc_difference 199..201: note = a, c, t, g, unknown or other
  misc_difference 210..215: note = a, c, t, g, unknown or other
  misc_difference 219..221: note = a, c, t, g, unknown or other
  misc_difference 223..224: note = a, c, t, g, unknown or other
  misc_difference 229: note = a, c, t, g, unknown or other
  misc_difference 256: note = a, c, t, g, unknown or other
  source 1..330: mol_type = other DNA
gggtgaatggagcgagcagcgtcttcgngngngaggacgtgnnngtctgngtgngtnngngagtgtgtgctagggttagggttagggttagggttagggttagggttagggttagggttagggttagggttagggttagggttagggttagggttagggttagggttagggttagggttagggttagggttagggtnannnttagggttnnnnnnaggnnnanngttanggttagggttagggttagggttagggntagggttagggttagggttagggttagggttagggttagggttagggtgtgtggggttgagggcgttggagcgg

SEQ ID NO: 2889 - DNA, 64 bp, synthetic construct
  misc_feature 1..64: note = Description of Artificial Sequence: Synthetic VEGFA target binding site sequence
  source 1..64: mol_type = other DNA
gattgcctttactccatgcctttcttctgctctaactctgacaatctgtcttgccatgccataa

SEQ ID NO: 2890 - DNA, 20 bp, synthetic construct
  misc_feature 1..20: note = Description of Artificial Sequence: Synthetic VEGFA target binding site sequence
  source 1..20: mol_type = other DNA
tggggggagtttgctcctgg

SEQ ID NO: 2891 - DNA, 21 bp, synthetic construct
  misc_feature 1..21: note = Description of Artificial Sequence: Synthetic VEGFA target binding site sequence
  source 1..21: mol_type = other DNA
gtggggggagtttgctcctgg

SEQ ID NO: 2892 - DNA, 23 bp, synthetic construct
  misc_feature 1..23: note = Description of Artificial Sequence: Synthetic VEGFA target binding site sequence
  source 1..23: mol_type = other DNA
gggtggggggagtttgctcctgg

SEQ ID NO: 2893 - DNA, 20 bp, synthetic construct
  misc_feature 1..20: note = Description of Artificial Sequence: Synthetic VEGFA target binding site sequence
  source 1..20: mol_type = other DNA
gagtgagtgtgtgcgtgtgg

SEQ ID NO: 2894 - DNA, 21 bp, synthetic construct
  misc_feature 1..21: note = Description of Artificial Sequence: Synthetic VEGFA target binding site sequence
  source 1..21: mol_type = other DNA
tgagtgagtgtgtgcgtgtgg

SEQ ID NO: 2895 - DNA, 23 bp, synthetic construct
  misc_feature 1..23: note = Description of Artificial Sequence: Synthetic VEGFA target binding site sequence
  source 1..23: mol_type = other DNA
ggtgagtgagtgtgtgcgtgtgg

SEQ ID NO: 2896 - DNA, 20 bp, synthetic construct
  misc_feature 1..20: note = Description of Artificial Sequence: Synthetic EMX1 target binding oligonucleotide
  source 1..20: mol_type = other DNA
tccgagcagaagaagaaggg

SEQ ID NO: 2897 - DNA, 21 bp, synthetic construct
  misc_feature 1..21: note = Description of Artificial Sequence: Synthetic EMX1 target binding oligonucleotide
  source 1..21: mol_type = other DNA
gtccgagcagaagaagaaggg

SEQ ID NO: 2898 - DNA, 23 bp, synthetic construct
  misc_feature 1..23: note = Description of Artificial Sequence: Synthetic EMX1 target binding oligonucleotide
  source 1..23: mol_type = other DNA
gagtccgagcagaagaagaaggg

SEQ ID NO: 2899 - DNA, 67 bp, synthetic construct
  misc_feature 1..67: note = Description of Artificial Sequence: Synthetic VEGFA target binding site sequence
  source 1..67: mol_type = other DNA
agacaggacattctgacaccccaggagcaaactccctccatcccacaaatccgtccttagatgtgca

SEQ ID NO: 2900 - DNA, 38 bp, synthetic construct
  misc_feature 1..38: note = Description of Artificial Sequence: Synthetic VEGFA target binding site sequence
  source 1..38: mol_type = other DNA
aactccctccatcccacaaatccgtccttagatgtgca

SEQ ID NO: 2901 - DNA, 50 bp, synthetic construct
  misc_feature 1..50: note = Description of Artificial Sequence: Synthetic VEGFA target binding site sequence
  source 1..50: mol_type = other DNA
agacaggacattctgacaccccatcccacaaatccgtccttagatgtgca

SEQ ID NO: 2902 - DNA, 52 bp, synthetic construct
  misc_feature 1..52: note = Description of Artificial Sequence: Synthetic VEGFA target binding site sequence
  source 1..52: mol_type = other DNA
agacaggacattctgacaccccaggacccacaaatccgtccttagatgtgca

SEQ ID NO: 2903 - DNA, 65 bp, synthetic construct
  misc_feature 1..65: note = Description of Artificial Sequence: Synthetic VEGFA target binding site sequence
  source 1..65: mol_type = other DNA
agacaggacattctgacaccccaggcaaactccctccatcccacaaatccgtccttagatgtgca

SEQ ID NO: 2904 - DNA, 69 bp, synthetic construct
  misc_feature 1..69: note = Description of Artificial Sequence: Synthetic VEGFA target binding site sequence
  source 1..69: mol_type = other DNA
agacaggacattctgacaccccaggagggcaaactccctccatcccacaaatccgtccttagatgtgca

SEQ ID NO: 2905 - DNA, 66 bp, synthetic construct
  misc_feature 1..66: note = Description of Artificial Sequence: Synthetic VEGFA target binding site sequence
  source 1..66: mol_type = other DNA
gagagaggctcccatcacgggggagggagtttgctcctggggaacctgtgatccccacagggaaca

SEQ ID NO: 2906 - DNA, 31 bp, synthetic construct
  misc_feature 1..31: note = Description of Artificial Sequence: Synthetic VEGFA target binding site sequence
  source 1..31: mol_type = other DNA
gagagaggctcccatcacgggggagggaaca

SEQ ID NO: 2907 - DNA, 52 bp, synthetic construct
  misc_feature 1..52: note = Description of Artificial Sequence: Synthetic VEGFA target binding site sequence
  source 1..52: mol_type = other DNA
gagagaggctcccatcacgggggaggggaacctgtgatccccacagggaaca

SEQ ID NO: 2908 - DNA, 67 bp, synthetic construct
  misc_feature 1..67: note = Description of Artificial Sequence: Synthetic VEGFA target binding site sequence
  source 1..67: mol_type = other DNA
tggactctacccactgaatgccaggagcaaacttcccctccccgagttgtgacagcaaaaatgtctc

SEQ ID NO: 2909 - DNA, 24 bp, synthetic construct
  misc_feature 1..24: note = Description of Artificial Sequence: Synthetic VEGFA target binding site sequence
  source 1..24: mol_type = other DNA
tggactctacccactgaatgtctc

SEQ ID NO: 2910 - DNA, 42 bp, synthetic construct
  misc_feature 1..42: note = Description of Artificial Sequence: Synthetic VEGFA target binding site sequence
  source 1..42: mol_type = other DNA
tggactctacccctccccgagttgtgacagcaaaaatgtctc

SEQ ID NO: 2911 - DNA, 43 bp, synthetic construct
  misc_feature 1..43: note = Description of Artificial Sequence: Synthetic VEGFA target binding site sequence
  source 1..43: mol_type = other DNA
tggactctaccccctccccgagttgtgacagcaaaaatgtctc

SEQ ID NO: 2912 - DNA, 52 bp, synthetic construct
  misc_feature 1..52: note = Description of Artificial Sequence: Synthetic VEGFA target binding site sequence
  source 1..52: mol_type = other DNA
tggactctacccactgaatgccctccccgagttgtgacagcaaaaatgtctc

SEQ ID NO: 2913 - DNA, 52 bp, synthetic construct; identical to SEQ ID NO: 2912
  misc_feature 1..52: note = Description of Artificial Sequence: Synthetic VEGFA target binding site sequence
  source 1..52: mol_type = other DNA

SEQ ID NO: 2914 - DNA, 60 bp, synthetic construct
  misc_feature 1..60: note = Description of Artificial Sequence: Synthetic VEGFA target binding site sequence
  source 1..60: mol_type = other DNA
tggactctacccactgaatgcaaacttcccctccccgagttgtgacagcaaaaatgtctc

SEQ ID NO: 2915 - DNA, 61 bp, synthetic construct
  misc_feature 1..61: note = Description of Artificial Sequence: Synthetic VEGFA target binding site sequence
  source 1..61: mol_type = other DNA
tggactctacccactgaatgccaggattcccctccccgagttgtgacagcaaaaatgtctc

SEQ ID NO: 2916 - DNA, 61 bp, synthetic construct
  misc_feature 1..61: note = Description of Artificial Sequence: Synthetic VEGFA target binding site sequence
  source 1..61: mol_type = other DNA
tggactctacccactgaatgcctggcatcccctccccgagttgtgacagcaaaaatgtctc

SEQ ID NO: 2917 - DNA, 64 bp, synthetic construct
  misc_feature 1..64: note = Description of Artificial Sequence: Synthetic VEGFA target binding site sequence
  source 1..64: mol_type = other DNA
tggactctacccactgaatgccaggaaacttcccctccccgagttgtgacagcaaaaatgtctc

SEQ ID NO: 2918 - DNA, 226 bp, synthetic construct
  misc_feature 1..226: note = Description of Artificial Sequence: Synthetic VEGFA target binding site sequence
  source 1..226: mol_type = other DNA
tggactctacccactgaatgccaggatggaagataattttttccatagaccagggtgggggaatggtttcgggatgattcaagcacatcacatttattgtgcactttatttctattactattatattgtaatgtatactaaaaataattatacaactcaccataatgtagaaccagtgggagccgcaaacttcccctccccgagttgtgacagcaaaaatgtctca

SEQ ID NO: 2919 - DNA, 112 bp, synthetic construct
  misc_feature 1..112: note = Description of Artificial Sequence: Synthetic VEGFA target binding site sequence
  source 1..112: mol_type = other DNA
tggactctacccactgaatgccaggcaaacttcccctccccgagttgtgacagcaaaaatgtctggcctaatgtctggcaaaaatgtctcaagacattgccaaatgtcccct

SEQ ID NO: 2920 - DNA, 67 bp, synthetic construct
  misc_feature 1..67: note = Description of Artificial Sequence: Synthetic VEGFA target binding site sequence
  source 1..67: mol_type = other DNA
acccacctccctatcctcaaaacttggccagaggcggggtggaggggcccctaggagcgccttggtg

SEQ ID NO: 2921 - DNA, 16 bp, synthetic construct
  misc_feature 1..16: note = Description of Artificial Sequence: Synthetic VEGFA target binding site sequence
  source 1..16: mol_type = other DNA
acccaccgccttggtg

SEQ ID NO: 2922 - DNA, 31 bp, synthetic construct
  misc_feature 1..31: note = Description of Artificial Sequence: Synthetic VEGFA target binding site sequence
  source 1..31: mol_type = other DNA
acccacctcctatcctaggagcgccttggtg

SEQ ID NO: 2923 - DNA, 34 bp, synthetic construct
  misc_feature 1..34: note = Description of Artificial Sequence: Synthetic VEGFA target binding site sequence
  source 1..34: mol_type = other DNA
acccacctccctatcctcaaaacttcccttggtg

SEQ ID NO: 2924 - DNA, 49 bp, synthetic construct
  misc_feature 1..49: note = Description of Artificial Sequence: Synthetic VEGFA target binding site sequence
  source 1..49: mol_type = other DNA
acccacctccctatcctcaaaacttggccagagtaggagcgccttggtg

SEQ ID NO: 2925 - DNA, 57 bp, synthetic construct
  misc_feature 1..57: note = Description of Artificial Sequence: Synthetic VEGFA target binding site sequence
  source 1..57: mol_type = other DNA
acccacctccctatcctcaaaacttggggtggaggggcccctaggagcgccttggtg

SEQ ID NO: 2926 - DNA, 60 bp, synthetic construct
  misc_feature 1..60: note = Description of Artificial Sequence: Synthetic VEGFA target binding site sequence
  source 1..60: mol_type = other DNA
acccacctccctatcctcaaaacttggcgggttggaggggcccctaggagcgccttggtg

SEQ ID NO: 2927 - DNA, 61 bp, synthetic construct
  misc_feature 1..61: note = Description of Artificial Sequence: Synthetic VEGFA target binding site sequence
  source 1..61: mol_type = other DNA
acccacctccctatcctcaaaacttggccagagtggaggggcccctaggagcgccttggtg

SEQ ID NO: 2928 - DNA, 87 bp, synthetic construct
  misc_feature 1..87: note = Description of Artificial Sequence: Synthetic VEGFA target binding site sequence
  source 1..87: mol_type = other DNA
acccacctccctatcctcaaaactctggcagtctgtcagtgcgttatcttgtcacacttctacaagggggctctccctgcattctga

SEQ ID NO: 2929 - DNA, 175 bp, synthetic construct
  misc_feature 1..175: note = Description of Artificial Sequence: Synthetic VEGFA target binding site sequence
  source 1..175: mol_type = other DNA
acccacctccctatcctcaaaacttggccagagggcgcctccccaggaagtgctccggccagcccagggtaaacacgctagccctgcccctctgggaccatagcccggggacccagactcttggccacgctcattcccaccgcggggtggaggggcccctaggagcgccttggtg

SEQ ID NO: 2930 - DNA, 67 bp, synthetic construct
  misc_feature 1..67: note = Description of Artificial Sequence: Synthetic VEGFA target binding site sequence
  source 1..67: mol_type = other DNA
tgactgtcggtgccccacatgtggcagatgcccagaggcggggtgtggggggtactttgtgggcgtt

SEQ ID NO: 2931 - DNA, 34 bp, synthetic construct
  misc_feature 1..34: note = Description of Artificial Sequence: Synthetic VEGFA target binding site sequence
  source 1..34: mol_type = other DNA
tgactgtcggtgtggggggtactttgtgggcgtt

SEQ ID NO: 2932 - DNA, 44 bp, synthetic construct
  misc_feature 1..44: note = Description of Artificial Sequence: Synthetic VEGFA target binding site sequence
  source 1..44: mol_type = other DNA
tgactgtcggtgccccacatgtggcagatgcccagaggggcgtt

SEQ ID NO: 2933 - DNA, 52 bp, synthetic construct
  misc_feature 1..52: note = Description of Artificial Sequence: Synthetic VEGFA target binding site sequence
  source 1..52: mol_type = other DNA
tgactgtcggtgccccacatgtggcagatgtggggggtactttgtgggcgtt

SEQ ID NO: 2934 - DNA, 53 bp, synthetic construct
  misc_feature 1..53: note = Description of Artificial Sequence: Synthetic VEGFA target binding site sequence
  source 1..53: mol_type = other DNA
tgactgtcggtgccccacatgtggcggggtgtggggggtactttgtgggcgtt

SEQ ID NO: 2935 - DNA, 63 bp, synthetic construct
  misc_feature 1..63: note = Description of Artificial Sequence: Synthetic VEGFA target binding site sequence
  source 1..63: mol_type = other DNA
tgactgtcggtgccccacatgtggcagatggaggcggggtgtggggggtactttgtgggcgtt

SEQ ID NO: 2936 - DNA, 63 bp, synthetic construct
  misc_feature 1..63: note = Description of Artificial Sequence: Synthetic VEGFA target binding site sequence
  source 1..63: mol_type = other DNA
tgactgtcggtgccccacatgtggcagatgcccagagggtgtggggggtactttgtgggcgtt

SEQ ID NO: 2937 - DNA, 65 bp, synthetic construct
  misc_feature 1..65: note = Description of Artificial Sequence: Synthetic VEGFA target binding site sequence
  source 1..65: mol_type = other DNA
tgactgtcggtgccccacatgtggcagatgcccagagggggtgtggggggtactttgtgggcgtt

SEQ ID NO: 2938 - DNA, 69 bp, synthetic construct
  misc_feature 1..69: note = Description of Artificial Sequence: Synthetic VEGFA target binding site sequence
  source 1..69: mol_type = other DNA
tgactgtcggtgccccacatgtggcagatgcccagagttgcggggtgtggggggtactttgtgggcgtt

SEQ ID NO: 2939 - DNA, 71 bp, synthetic construct
  misc_feature 1..71: note = Description of Artificial Sequence: Synthetic VEGFA target binding site sequence
  source 1..71: mol_type = other DNA
tgactgtcggtgccccacatgtggcagatgcccagagctgcgcggggtgtggggggtactttgtgggcgtt

SEQ ID NO: 2940 - DNA, 67 bp, synthetic construct
  misc_feature 1..67: note = Description of Artificial Sequence: Synthetic VEGFA target binding site sequence
  source 1..67: mol_type = other DNA
acaagatgactatgtccctctgggccccatcctcccctccccacccaccccgcctcaggcttgaaga

SEQ ID NO: 2941 - skipped

SEQ ID NO: 2942 - DNA, 14 bp, synthetic construct
  misc_feature 1..14: note = Description of Artificial Sequence: Synthetic VEGFA target binding site sequence
  source 1..14: mol_type = other DNA
ctcaggcttgaaga

SEQ ID NO: 2943 - skipped

SEQ ID NO: 2944 - DNA, 35 bp, synthetic construct
  misc_feature 1..35: note = Description of Artificial Sequence: Synthetic VEGFA target binding site sequence
  source 1..35: mol_type = other DNA
acaagatgactatgtccctctgggccccatcctcc

SEQ ID NO: 2945 - DNA, 33 bp, synthetic construct
  misc_feature 1..33: note = Description of Artificial Sequence: Synthetic VEGFA target binding site sequence
  source 1..33: mol_type = other DNA
acaagatgactatgtccctctgggccttgaaga

SEQ ID NO: 2946 - DNA, 53 bp, synthetic construct
  misc_feature 1..53: note = Description of Artificial Sequence: Synthetic VEGFA target binding site sequence
  source 1..53: mol_type = other DNA
acaagatgactatgtccctctgggccccatcctcccctccccaggcttgaaga

SEQ ID NO: 2947 - DNA, 55 bp, synthetic construct
  misc_feature 1..55: note = Description of Artificial Sequence: Synthetic VEGFA target binding site sequence
  source 1..55: mol_type = other DNA
acaagatgactatgtccctctgggccccatcctcccctcccctcaggcttgaaga

SEQ ID NO: 2948 - DNA, 56 bp, synthetic construct
  misc_feature 1..56: note = Description of Artificial Sequence: Synthetic VEGFA target binding site sequence
  source 1..56: mol_type = other DNA
acaagatgactatgtccctctgggccccatcctcccctccccagcaggcttgaaga

SEQ ID NO: 2949 - DNA, 56 bp, synthetic construct
  misc_feature 1..56: note = Description of Artificial Sequence: Synthetic VEGFA target binding site sequence
  source 1..56: mol_type = other DNA
acaagatgactatgtccctctgggccccatcctcccctccccacccaccttgaaga

SEQ ID NO: 2950 - DNA, 56 bp, synthetic construct
  misc_feature 1..56: note = Description of Artificial Sequence: Synthetic VEGFA target binding site sequence
  source 1..56: mol_type = other DNA
acaagatgactatgtccctctgggccccatcctcccctcccgctcaggcttgaaga

SEQ ID NO: 2951 - DNA, 214 bp, synthetic construct
  misc_feature 1..214: note = Description of Artificial Sequence: Synthetic VEGFA target binding site sequence
  source 1..214: mol_type = other DNA
acaagatgactatgtccctctgggcccgcctcaagtgatccagctgccttggcctccaaaagtgctagcagtacagatgtgagcctccatgcctggcctattgcaacatcccatctctgtgaagcagggttttctgcagtgacagcaagaagagcacagggccaaaaaaactttgtcctttagaaaggatctaccttttaggctgagaatggca

SEQ ID NO: 2952 - DNA, 67 bp, synthetic construct
  misc_feature 1..67: note = Description of Artificial Sequence: Synthetic VEGFA target binding site sequence
  source 1..67: mol_type = other DNA
gagtgagagagcgagtgagtgagtgagtgagtgtgtgtgtgggggggactcggcttgttgttgtcgg

SEQ ID NO: 2953 - DNA, 63 bp, synthetic construct
  misc_feature 1..63: note = Description of Artificial Sequence: Synthetic VEGFA target binding site sequence
  source 1..63: mol_type = other DNA
gagtgagagagcgagtgagtgagtgagtgagtgtgtgggggggactcggcttgttgttgtcgg

SEQ ID NO: 2954 - DNA, 61 bp, synthetic construct
  misc_feature 1..61: note = Description of Artificial Sequence: Synthetic VEGFA target binding site sequence
  source 1..61: mol_type = other DNA
gagtgagagagcgagtgagtgagtgagtgagtgtgggggggactcggcttgttgttgtcgg

SEQ ID NO: 2955 - DNA, 67 bp, synthetic construct
  misc_feature 1..67: note = Description of Artificial Sequence: Synthetic VEGFA target binding site sequence
  source 1..67: mol_type = other DNA
gtgttgggatgcgggagtgggtgagtgagtgcgtgcgggtggcgatgcaagcgtgtgcgaatgcgtg

SEQ ID NO: 2956 - DNA, 16 bp, synthetic construct
  misc_feature 1..16: note = Description of Artificial Sequence: Synthetic VEGFA target binding site sequence
  source 1..16: mol_type = other DNA
gtgttgggatgcggga

SEQ ID NO: 2957 - DNA, 17 bp, synthetic construct
  misc_feature 1..17: note = Description of Artificial Sequence: Synthetic VEGFA target binding site sequence
  source 1..17: mol_type = other DNA
gtgttgggatgcgcgtg

SEQ ID NO: 2958 - DNA, 57 bp, synthetic construct
  misc_feature 1..57: note = Description of Artificial Sequence: Synthetic VEGFA target binding site sequence
  source 1..57: mol_type = other DNA
gtgttgggatgcgggagtgggtgagtgagtggcgatgcaagcgtgtgcgaatgcgtg

SEQ ID NO: 2959 - DNA, 69 bp, synthetic construct
  misc_feature 1..69: note = Description of Artificial Sequence: Synthetic VEGFA target binding site sequence
  source 1..69: mol_type = other DNA
gtgttgggatgcgggagtgggtgagtgagtgcaagtgcgggtggcgatgcaagcgtgtgcgaatgcgtg

SEQ ID NO: 2960 - DNA, 67 bp, synthetic construct
  misc_feature 1..67: note = Description of Artificial Sequence: Synthetic VEGFA target binding site sequence
  source 1..67: mol_type = other DNA
tttcaaagacagtagatcttaaatgtcctcacgcacacactcacccacacataaaaggtggtaactg

SEQ ID NO: 2961 - DNA, 35 bp, synthetic construct
  misc_feature 1..35: note = Description of Artificial Sequence: Synthetic VEGFA target binding site sequence
  source 1..35: mol_type = other DNA
tttcaaagacagtagatcttaaaaggtggtaactg

SEQ ID NO: 2962 - DNA, 44 bp, synthetic construct
  misc_feature 1..44: note = Description of Artificial Sequence: Synthetic VEGFA target binding site sequence
  source 1..44: mol_type = other DNA
tttcaaagacagtagatcttaaatgtcataaaaggtggtaactg

SEQ ID NO: 2963 - DNA, 49 bp, synthetic construct
  misc_feature 1..49: note = Description of Artificial Sequence: Synthetic VEGFA target binding site sequence
  source 1..49: mol_type = other DNA
tttcaaagacagtagatcttaaatgtcctcacataaaaggtggtaactg

SEQ ID NO: 2964 - DNA, 52 bp, synthetic construct
  misc_feature 1..52: note = Description of Artificial Sequence: Synthetic VEGFA target binding site sequence
  source 1..52: mol_type = other DNA
tttcaaagacagtagatcttaaatgtcctccacacataaaaggtggtaactg

SEQ ID NO: 2965 - DNA, 55 bp, synthetic construct
  misc_feature 1..55: note = Description of Artificial Sequence: Synthetic VEGFA target binding site sequence
  source 1..55: mol_type = other DNA
tttcaaagacagtagatcttaaatgtcctcacccacacataaaaggtggtaactg

SEQ ID NO: 2966 - DNA, 65 bp, synthetic construct
  misc_feature 1..65: note = Description of Artificial Sequence: Synthetic VEGFA target binding site sequence
  source 1..65: mol_type = other DNA
tttcaaagacagtagatcttaaatgtcctcacacacactcacccacacataaaaggtggtaactg

SEQ ID NO: 2967 - DNA, 128 bp, synthetic construct
  misc_feature 1..128: note = Description of Artificial Sequence: Synthetic VEGFA target binding site sequence
  source 1..128: mol_type = other DNA
tttcaaagacagtagatcttaaatgtcctcacaggctggagtacagtggcatgatatcagctcactgcaatctcgggctcccgggttcaagccatgcacacactcacccacacataaaaggtggtaac

SEQ ID NO: 2968 - DNA, 67 bp, synthetic construct
  misc_feature 1..67: note = Description of Artificial Sequence: Synthetic VEGFA target binding site sequence
  source 1..67: mol_type = other DNA
acctgtacatctgcacaagattgcctttactccatgcctttcttcttctgctctaactctgacaatc

SEQ ID NO: 2969 - DNA, 39 bp, synthetic construct
  misc_feature 1..39: note = Description of Artificial Sequence: Synthetic VEGFA target binding site sequence
  source 1..39: mol_type = other DNA
acctgtacatctgcacaagattgcctttactccacaatc

SEQ ID NO: 2970 - DNA, 47 bp, synthetic construct
  misc_feature 1..47: note = Description of Artificial Sequence: Synthetic VEGFA target binding site sequence
  source 1..47: mol_type = other DNA
acctgtacatctgcacaagattgcctttactccatactctgacaatc

SEQ ID NO: 2971 - DNA, 47 bp, synthetic construct
  misc_feature 1..47: note = Description of Artificial Sequence: Synthetic VEGFA target binding site sequence
  source 1..47: mol_type = other DNA
acctgtacatctgcacaagattgccttctgctctaactctgacaatc

SEQ ID NO: 2972 - DNA, 48 bp, synthetic construct
  misc_feature 1..48: note = Description of Artificial Sequence: Synthetic VEGFA target binding site sequence
  source 1..48: mol_type = other DNA
acctgtacatctgcacaagattgcctttactccatgcctttctcaatc

SEQ ID NO: 2973 - DNA, 53 bp, synthetic construct
  misc_feature 1..53: note = Description of Artificial Sequence: Synthetic VEGFA target binding site sequence
  source 1..53: mol_type = other DNA
acctgtacatctgcacaagattgcctttactccatgctctaactctgacaatc

SEQ ID NO: 2974 - DNA, 59 bp, synthetic construct
  misc_feature 1..59: note = Description of Artificial Sequence: Synthetic VEGFA target binding site sequence
  source 1..59: mol_type = other DNA
tcctgtacatctgcacaagattgcctttactcccttcttctgctctaactctgacaatc

SEQ ID NO: 2975 - DNA, 67 bp, synthetic construct
  misc_feature 1..67: note = Description of Artificial Sequence: Synthetic VEGFA target binding site sequence
  source 1..67: mol_type = other DNA
tcagacaggacattctgacaccccaggagcaaactccctccatcccacaaatccgtccttagatgtg

SEQ ID NO: 2976 - DNA, 52 bp, synthetic construct
  misc_feature 1..52: note = Description of Artificial Sequence: Synthetic VEGFA target binding site sequence
  source 1..52: mol_type = other DNA
tcagacaggacattcaaactccctccatcccacaaatccgtccttagatgtg

SEQ ID NO: 2977 - DNA, 57 bp, synthetic construct
  misc_feature 1..57: note = Description of Artificial Sequence: Synthetic VEGFA target binding site sequence
  source 1..57: mol_type = other DNA
tcagacaggacattctgagcaaactccctccatcccacaaatccgtccttagatgtg

SEQ ID NO: 2978 - DNA, 58 bp, synthetic construct
  misc_feature 1..58: note = Description of Artificial Sequence: Synthetic VEGFA target binding site sequence
  source 1..58: mol_type = other DNA
tcagacaggacattctgacgcaaactccctccatcccacaaatccgtccttagatgtg

SEQ ID NO: 2979 - DNA, 60 bp, synthetic construct
  misc_feature 1..60: note = Description of Artificial Sequence: Synthetic VEGFA target binding site sequence
  source 1..60: mol_type = other DNA
tcagacaggacatcctgacacgcaaactccctccatcccacaaatccgtccttagatgtg

SEQ ID NO: 2980 - DNA, 65 bp, synthetic construct
  misc_feature 1..65: note = Description of Artificial Sequence: Synthetic VEGFA target binding site sequence
  source 1..65: mol_type = other DNA
tcagacaggacattctgacaccccaggcaaactccctccatcccacaaatccgtccttagatgtg

SEQ ID NO: 2981 - DNA, 69 bp, synthetic construct
  misc_feature 1..69: note = Description of Artificial Sequence: Synthetic VEGFA target binding site sequence
  source 1..69: mol_type = other DNA
tcagacaggacattctgacaccccaggatgtcctcctccctccatcccacaaatccgtccttagatgtg

SEQ ID NO: 2982 - DNA, 105 bp, synthetic construct
  misc_feature 1..105: note = Description of Artificial Sequence: Synthetic VEGFA target binding site sequence
  misc_difference 5: note = a, c, t, g, unknown or other
  misc_difference 15..16: note = a, c, t, g, unknown or other
  misc_difference 18: note = a, c, t, g, unknown or other
  misc_difference 32..33: note = a, c, t, g, unknown or other
  misc_difference 43: note = a, c, t, g, unknown or other
  misc_difference 45: note = a, c, t, g, unknown or other
  misc_difference 47..49: note = a, c, t, g, unknown or other
  misc_difference 52..53: note = a, c, t, g, unknown or other
  misc_difference 65: note = a, c, t, g, unknown or other
  source 1..105: mol_type = other DNA
tcagncaggacattnngncaccccaggaaacnngagttttcgntncnnnganngtcagacccagnagcaaactccctccatcccacaaatccgtccttagatgtg

SEQ ID NO: 2983 - DNA, 121 bp, synthetic construct
  misc_feature 1..121: note = Description of Artificial Sequence: Synthetic VEGFA target binding site sequence
  misc_difference 15: note = a, c, t, g, unknown or other
  misc_difference 31: note = a, c, t, g, unknown or other
  misc_difference 37: note = a, c, t, g, unknown or other
  misc_difference 51: note = a, c, t, g, unknown or other
  misc_difference 57: note = a, c, t, g, unknown or other
  misc_difference 59..62: note = a, c, t, g, unknown or other
  misc_difference 69: note = a, c, t, g, unknown or other
  misc_difference 71: note = a, c, t, g, unknown or other
  misc_difference 77..78: note = a, c, t, g, unknown or other
  misc_difference 82: note = a, c, t, g, unknown or other
  source 1..121: mol_type = other DNA
tcagacaggacattntgacaccccaggagtntgcacntcagttttctttantatgtngnnnnggggcangnacaaanntttngcaaactccctccatcccacaaatccgtccttagatgtg

SEQ ID NO: 2984 - DNA, 161 bp, synthetic construct
  misc_feature 1..161: note = Description of Artificial Sequence: Synthetic VEGFA target binding site sequence
  misc_difference 135: note = a, c, t, g, unknown or other
  misc_difference 137..138: note = a, c, t, g, unknown or other
  misc_difference 154: note = a, c, t, g, unknown or other
  source 1..161: mol_type = other DNA
tcagacaggacattctgacaccccaggatgtttgtttgagtcagagtctctcttttgtcacccaggctggagtgcagtggaaacctgtgccttttgtatatcctctttgaaggttaaagagtcatcatggatcancnncataaagcaaactccntccatcc

SEQ ID NO: 2985 - DNA, 314 bp, synthetic construct
  misc_feature 1..314: note = Description of Artificial Sequence: Synthetic VEGFA target binding site sequence
  source 1..314: mol_type = other DNA
tcagacaggacattctgacaccccaggataagcggcagggtcggaacaggagagcgcacgagggagcttccagggggaaacgcctggtatctttatagtcctgtcgggtttcgccacctctaggggagttctgagctctgacgccgggcgtgttaggagatagcaggccgttaatgaccatcccagccgaattcctcactgtgcagatgaggaagtgagctcagggaggctgagtgtcccaggcctgttgccagatgaggccacgctgagactgtgcaaactccctccatcccacaaatccgtccttagatgtg

SEQ ID NO: 2986 - DNA, 67 bp, synthetic construct
  misc_feature 1..67: note = Description of Artificial Sequence: Synthetic VEGFA target binding site sequence
  source 1..67: mol_type = other DNA
tggagagaggctcccatcacgggggagggagtttgctcctggggaacctgtgatccccacagggaac

SEQ ID NO: 2987 - DNA, 56 bp, synthetic construct
  misc_feature 1..56: note = Description of Artificial Sequence: Synthetic VEGFA target binding site sequence
  source 1..56: mol_type = other DNA
tggagagaggctcccatcacgggggagggagtttgcctgtgatccccacagggaac

SEQ ID NO: 2988 - DNA, 60 bp, synthetic construct
  misc_feature 1..60: note = Description of Artificial Sequence: Synthetic VEGFA target binding site sequence
  source 1..60: mol_type = other DNA
tggagagaggctcccatcacgggggagggagtttgggaacctgtgatccccacagggaac

SEQ ID NO: 2989 - DNA, 67 bp, synthetic construct
  misc_feature 1..67: note = Description of Artificial Sequence: Synthetic VEGFA target binding site sequence
  source 1..67: mol_type = other DNA
agcatcgctggactctacccactgaatgccaggagcaaacttcccctccccgagttgtgacagcaaa

SEQ ID NO: 2990 - DNA, 53 bp, synthetic construct
  misc_feature 1..53: note = Description of Artificial Sequence: Synthetic VEGFA target binding site sequence
  source 1..53: mol_type = other DNA
agcatcgctggactctacccactgaatgccaggacccgagttgtgacagcaaa

SEQ ID NO: 2991 - DNA, 58 bp, synthetic construct
  misc_feature 1..58: note = Description of Artificial Sequence: Synthetic VEGFA target binding site sequence
  source 1..58: mol_type = other DNA
agcatcgctggactctacccactgagcaaacttcccctccccgagttgtgacagcaaa

SEQ ID NO: 2992 - DNA, 65 bp, synthetic construct
  misc_feature 1..65: note = Description of Artificial Sequence: Synthetic VEGFA target binding site sequence
  source 1..65: mol_type = other DNA
agcatcgctggactctacccactgaatgccaggcaaacttcccctccccgagttgtgacagcaaa

SEQ ID NO: 2993 - DNA, 200 bp, synthetic construct
  misc_feature 1..200: note = Description of Artificial Sequence: Synthetic VEGFA target binding site sequence
  source 1..200: mol_type = other DNA
agcatcgctggactctacccactgaatgccaggagttcagacgattgaatgtatcaacttggcacattgcctatcaactggtgagtgctcaaaaatatccattgctgtgatcagtaatgccacagggtgaccatttaaggacagagtccatgttttatccatccttagcaaacttcccctccccgagttgtgacagcaaa

SEQ ID NO: 2994 - DNA, 209 bp, synthetic construct
  misc_feature 1..209: note = Description of Artificial Sequence: Synthetic VEGFA target binding site sequence
  source 1..209: mol_type = other DNA
agcatcgctggactctacccactgaatgccagagcccttccttctccctctcttcctccagaggtcctgccgagatcaggttggaggtcctctttgttcttatgcccattcctcccccaggcacttggaggagggcactgtttttgagtgtgcaagtctttctctgttactgttgggcaaacttcccctccccgagttgtgacagcaaa

SEQ ID NO: 2995 - DNA, 253 bp, synthetic construct
  misc_feature 1..253: note = Description of Artificial Sequence: Synthetic VEGFA target binding site sequence
  misc_difference 53: note = a, c, t, g, unknown or other
  misc_difference 67: note = a, c, t, g, unknown or other
  misc_difference 83..84: note = a, c, t, g, unknown or other
  misc_difference 91: note = a, c, t, g, unknown or other
  misc_difference 99: note = a, c, t, g, unknown or other
  misc_difference 108: note = a, c, t, g, unknown or other
  source 1..253: mol_type = other DNA
agcatcgctggactctacccactgaatgccaggatgttttgtttgcgacggantctcactctgtcgnccgggctggagtgcannggcacanttcctcanctgactgcnatgtccgcctcccggattcaagtgattctcctgccccagcctcccgagtagctgggattataggtgcctgccaccatgcctggctaattttttttttttttttaaatggagtctcactctgttgcccccgagttgtgacagcaaa

SEQ ID NO: 2996 - DNA, 67 bp, synthetic construct
  misc_feature 1..67: note = Description of Artificial Sequence: Synthetic VEGFA target binding site sequence
  source 1..67: mol_type = other DNA
cacctccctatcctcaaaacttggccagaggcggggtggaggggcccctaggagcgccttggtggga

SEQ ID NO: 2997 - DNA, 54 bp, synthetic construct
  misc_feature 1..54: note = Description of Artificial Sequence: Synthetic VEGFA target binding site sequence
  source 1..54: mol_type = other DNA
cacctccctatcctcaaaacttggccagaggcggggtggagcgccttggtggga

SEQ ID NO: 2998 - DNA, 60 bp, synthetic construct
  misc_feature 1..60: note = Description of Artificial Sequence: Synthetic VEGFA target binding site sequence
  source 1..60: mol_type = other DNA
cacctccctatcctcaaaacttggcggggtggaggggcccctaggagcgccttggtggga

SEQ ID NO: 2999 - DNA, 61 bp, synthetic construct
  misc_feature 1..61: note = Description of Artificial Sequence: Synthetic VEGFA target binding site sequence
  source 1..61: mol_type = other DNA
cacctccctatcctcaaaacttggacggggtggaggggcccctaggagcgccttggtggga

SEQ ID NO: 3000 - DNA, 65 bp, synthetic construct
  misc_feature 1..65: note = Description of Artificial Sequence: Synthetic VEGFA target binding site sequence
  source 1..65: mol_type = other DNA
cacctccctatcctcaaaacttggccaggcggggtggaggggcccctaggagcgccttggtggga

SEQ ID NO: 3001 - DNA, 141 bp, synthetic construct
  misc_feature 1..141: note = Description of Artificial Sequence: Synthetic VEGFA target binding site sequence
  misc_difference 36: note = a, c, t, g, unknown or other
  misc_difference 43: note = a, c, t, g, unknown or other
  misc_difference 67: note = a, c, t, g, unknown or other
  misc_difference 79: note = a, c, t, g, unknown or other
  misc_difference 106: note = a, c, t, g, unknown or other
  misc_difference 125: note = a, c, t, g, unknown or other
  misc_difference 136..137: note = a, c, t, g, unknown or other
  source 1..141: mol_type = other DNA
cacctccctatcctcaaaacttggccagagacttanacctaanacctcaaactatgagactgctacnagagaacatcanaaaaactttccaggacattcttctggnggggtggaggggcccctangagcgccttgnnggga

SEQ ID NO: 3002 - DNA, 217 bp, synthetic construct
  misc_feature 1..217: note = Description of Artificial Sequence: Synthetic VEGFA target binding site sequence
  source 1..217: mol_type = other DNA
cacctccctatcctcaaaacttggccagagtctacagatttataaaatattaccagttaatcatgacacatattgtttattttcaaatattttttctagttaaacccaccatttatataaccaattatatttgatattatttaaaatttttgtattaacaccccaccaaatcattttacagcggggtggaggggcccctaggagcgccttggtggga

SEQ ID NO: 3003 - DNA, 67 bp, synthetic construct
  misc_feature 1..67: note = Description of Artificial Sequence: Synthetic VEGFA target binding site sequence
  source 1..67: mol_type = other DNA
gtcggtgccccacatgtggcagatgcccagaggcggggtgtggggggtactttgtgggcgttttggg

SEQ ID NO: 3004 - DNA, 48 bp, synthetic construct
  misc_feature 1..48: note = Description of Artificial Sequence: Synthetic VEGFA target binding site sequence
  source 1..48: mol_type = other DNA
gtcggtgccccacgcggggtgtggggggtactttgtgggcgttttggg

SEQ ID NO: 3005 - DNA, 55 bp, synthetic construct
  misc_feature 1..55: note = Description of Artificial Sequence: Synthetic VEGFA target binding site sequence
  source 1..55: mol_type = other DNA
gtcggtgccccacatgtggcgcggggtgtggggggtactttgtgggcgttttggg

SEQ ID NO: 3006 - DNA, 62 bp, synthetic construct
  misc_feature 1..62: note = Description of Artificial Sequence: Synthetic VEGFA target binding site sequence
  source 1..62: mol_type = other DNA
gtcggtgccccacatgtggcagatgcccagaggtgtggggggtactttgtgggcgttttggg

SEQ ID NO: 3007 - DNA, 62 bp, synthetic construct
  misc_feature 1..62: note = Description of Artificial Sequence: Synthetic VEGFA target binding site sequence
  source 1..62: mol_type = other DNA
gtcggtgccccacatgtggcagatgcccaggggtgtggggggtactttgtgggcgttttggg

SEQ ID NO: 3008 - DNA, 63 bp, synthetic construct
  misc_feature 1..63: note = Description of Artificial Sequence: Synthetic VEGFA target binding site sequence
  source 1..63: mol_type = other DNA
gtcggtgccccacatgtggcagatgcccagagggtgtggggggtactttgtgggcgttttggg

SEQ ID NO: 3009 - DNA, 63 bp, synthetic construct
  misc_feature 1..63: note = Description of Artificial Sequence: Synthetic VEGFA target binding site sequence
  source 1..63: mol_type = other DNA
gtcggtgccccacatgtggcagatgcccgcggggtgtggggggtactttgtgggcgttttggg

SEQ ID NO: 3010 - DNA, 65 bp, synthetic construct
  misc_feature 1..65: note = Description of Artificial Sequence: Synthetic VEGFA target binding site sequence
  source 1..65: mol_type = other DNA
gtcggtgccccacatgtggcagatgcccaggcggggtgtggggggtactttgtgggcgttttggg

SEQ ID NO: 3011 - DNA, 67 bp, synthetic construct
  misc_feature 1..67: note = Description of Artificial Sequence: Synthetic VEGFA target binding site sequence
  source 1..67: mol_type = other DNA
gtccctctgggccccatcctcccctccccacccaccccgcctcaggcttgaagaggaaagaagagca

SEQ ID NO: 3012 - DNA, 31 bp, synthetic construct
  misc_feature 1..31: note = Description of Artificial Sequence: Synthetic VEGFA target binding site sequence
  misc_difference 17: note = a, c, t, g, unknown or other
  misc_difference 20: note = a, c, t, g, unknown or other
  misc_difference 22..24: note = a, c, t, g, unknown or other
  misc_difference 26..27: note = a, c, t, g, unknown or other
  misc_difference 29..31: note = a, c, t, g, unknown or other
  source 1..31: mol_type = other DNA
gtccctctgggccccanagnannnannannn

SEQ ID NO: 3013 - DNA, 48 bp, synthetic construct
  misc_feature 1..48: note = Description of Artificial Sequence: Synthetic VEGFA target binding site sequence
  source 1..48: mol_type = other DNA
gtccctctgggccccatcctcccctcccctgaagaggaaagaagagcg

SEQ ID NO: 3014 - DNA, 50 bp, synthetic construct
  misc_feature 1..50: note = Description of Artificial Sequence: Synthetic VEGFA target binding site sequence
  misc_difference 9..11: note = a, c, t, g, unknown or other
  misc_difference 13..14: note = a, c, t, g, unknown or other
  misc_difference 16: note = a, c, t, g, unknown or other
  misc_difference 20: note = a, c, t, g, unknown or other
  misc_difference 22: note = a, c, t, g, unknown or other
  source 1..50: mol_type = other DNA
gtccctctnnncnncntccncncctcaggcttgaagaggaaagaagagcg

SEQ ID NO: 3015 - DNA, 54 bp, synthetic construct
  misc_feature 1..54: note = Description of Artificial Sequence: Synthetic VEGFA target binding site sequence
  source 1..54: mol_type = other DNA
gtccctctgggccccatcctcccctccctcaggcttgaagaggaaagaagagcg

SEQ ID NO: 3016 - DNA, 57 bp, synthetic construct
  misc_feature 1..57: note = Description of Artificial Sequence: Synthetic VEGFA target binding site sequence
  source 1..57: mol_type = other DNA
gtccctctgggccccatcctcccctccccactcaggcttgaagaggaaagaagagcg

SEQ ID NO: 3017 - DNA, 59 bp, synthetic construct
  misc_feature 1..59: note = Description of Artificial Sequence: Synthetic VEGFA target binding site sequence
  misc_difference 8..14: note = a, c, t, g, unknown or other
  misc_difference 25..26: note = a, c, t, g, unknown or other
  misc_difference 30: note = a, c, t, g, unknown or other
  misc_difference 32: note = a, c, t, g, unknown or other
  source 1..59: mol_type = other DNA
gtccctcnnnnnnncctcctccccnncccncnctcaggcttgaagaggaaagaagagcg

SEQ ID NO: 3018 - DNA, 61 bp, synthetic construct
  misc_feature 1..61: note = Description of Artificial Sequence: Synthetic VEGFA target binding site sequence
  source 1..61: mol_type = other DNA
gtccctctgggccccatcctcccctccccacccactcaggcttgaagaggaaagaagagcg

SEQ ID NO: 3019 - DNA, 62 bp, synthetic construct
  misc_feature 1..62: note = Description of Artificial Sequence: Synthetic VEGFA target binding site sequence
  source 1..62: mol_type = other DNA
gtccctctgggccccatcctcccctccccacccacctcaggcttgaagaggaaagaagagcg

SEQ ID NO: 3020 - DNA, 125 bp, synthetic construct
  misc_feature 1..125: note = Description of Artificial Sequence: Synthetic VEGFA target binding site sequence
  source 1..125: mol_type = other DNA
gtccctctgggccccatcctcccctccccacccaccccgcatcgtacgtgtccttactaagctgcaatttggcatcttcagctaagtcgaagttcgacctcaggcttgaagaggaaagaagagcg

SEQ ID NO: 3021 - DNA, 67 bp, synthetic construct
  misc_feature 1..67: note = Description of Artificial Sequence: Synthetic VEGFA target binding site sequence
  source 1..67: mol_type = other DNA
gagagcgagtgagtgagtgagtgagtgtgtgtgtgggggggactcggcttgttgttgtcggtgactt

SEQ ID NO: 3022 - DNA, 347 bp, synthetic construct
  misc_feature 1..347: note = Description of Artificial Sequence: Synthetic VEGFA target binding site sequence
  misc_difference 30: note = a, c, t, g, unknown or other
  misc_difference 33: note = a, c, t, g, unknown or other
  misc_difference 35..38: note = a, c, t, g, unknown or other
  misc_difference 186..190: note = a, c, t, g, unknown or other
  misc_difference 192..194: note = a, c, t, g, unknown or other
  misc_difference 315: note = a, c, t, g, unknown or other
  misc_difference 318: note = a, c, t, g, unknown or other
  source 1..347: mol_type = other DNA
gagagcgagtgagtgagtgagtgagtgtgngtntnnnnatttcacacaacatacgagccggaagcataaagtgtaaagcctagggtgcctaatgagtgagctaactcacattaattgcgttgcgctcactgcccgctttccagtcgggaaacctgtcgtgccagctgcattaatgaatcggccaannnnngnnnagaggcggtttgcgtattgggcgctcttccgcttcctcgctcactgactcgctgcgctcggtcgttcggctgcggcgagcggtatcagctcactcaaaggcggtaatacggttatccacanaangggactcggcttgttgttgtcggtgactt

SEQ ID NO: 3023 - DNA, 67 bp, synthetic construct
  misc_feature 1..67: note = Description of Artificial Sequence: Synthetic VEGFA target binding site sequence
  source 1..67: mol_type = other DNA
tggaggtgttgggatgcgggagtgggtgagtgagtgcgtgcgggtggcgatgcaagcgtgtgcgaat

SEQ ID NO: 3024 - DNA, 59 bp, synthetic construct
  misc_feature 1..59: note = Description of Artificial Sequence: Synthetic VEGFA target binding site sequence
  source 1..59: mol_type = other DNA
tggaggtgttgggatgcgggagtgggtgcgtgcgggtggcgatgcaagcgtgtgcgaat

SEQ ID NO: 3025 - DNA, 59 bp, synthetic construct
  misc_feature 1..59: note = Description of Artificial Sequence: Synthetic VEGFA target binding site sequence
  source 1..59: mol_type = other DNA
tggaggtgttgggatgcgggagtgggtgagtgcgggtggcgatgcaagcgtgtgcgaat

SEQ ID NO: 3026 - DNA, 67 bp, synthetic construct
  misc_feature 1..67: note = Description of Artificial Sequence: Synthetic VEGFA target binding site sequence
  source 1..67: mol_type = other DNA
caaagacagtagatcttaaatgtcctcacgcacacactcacccacacataaaaggtggtaactgtgt

SEQ ID NO: 3027 - DNA, 57 bp, synthetic construct
  misc_feature 1..57: note = Description of Artificial Sequence: Synthetic VEGFA target binding site sequence
  source 1..57: mol_type = other DNA
caaagacagtagatcttaagcacacactcacccacacataaaaggtggtaactgtgt

SEQ ID NO: 3028 - DNA, 60 bp, synthetic construct
  misc_feature 1..60: note = Description of Artificial Sequence: Synthetic VEGFA target binding site sequence
  source 1..60: mol_type = other DNA
caaagacagtagatcttaaatgtcctcacgtcacccacacataaaaggtggtaactgtgt

SEQ ID NO: 3029 - DNA, 62 bp, synthetic construct
  misc_feature 1..62: note = Description of Artificial Sequence: Synthetic VEGFA target binding site sequence
  source 1..62: mol_type = other DNA
caaagacagtagatcttaaatgtcgcacacactcacccacacataaaaggtggtaactgtgt

SEQ ID NO: 3030 - DNA, 138 bp, synthetic construct
  misc_feature 1..138: note = Description of Artificial Sequence: Synthetic VEGFA target binding site sequence
  misc_difference 36: note = a, c, t, g, unknown or other
  source 1..138: mol_type = other DNA
caaagacagtagatcttaaatgtcctcacgccgacnattgcatgaagaatctgcttagggttaggcgttttgcgctgcttcgcgatgtacgggccagatagcacacactcacccacacataaaaggtggtaactgtgt

SEQ ID NO: 3031 - DNA, 224 bp, synthetic construct
  misc_feature 1..224: note = Description of Artificial Sequence: Synthetic VEGFA target binding site sequence
  source 1..224: mol_type = other DNA
caaagacagtagatcttaaatgtcctcacgcaaattttattttggttcatgatatggcttggcgtgtatgcttttcatttgtaaaattgctgttcttttgacaatttaagtgactgtttcattgactacaagtttgaaaataaaaattaattaagaaaaaaattccaatgactgtgctgtggttgggcacacactcacccacacataaaaggtggtaactgtgt

SEQ ID NO: 3032 - DNA, 257 bp, synthetic construct
  misc_feature 1..257: note = Description of Artificial Sequence: Synthetic VEGFA target binding site sequence
  misc_difference 90: note = a, c, t, g, unknown or other
  source 1..257: mol_type = other DNA
caaagacagtagatcttaaatgtcctcacgtggaaacatagtagatgaggtggcatatcatgaaaagtacccaacgatttatcacctcanaaaaaagctagttgactcaactgataaagcggacctgaggttaatctacttggctcttgcccatatgataaagttccgtgggcactttctcattgagggtgatctaaatccggacaactcggatgtcgagcacacactcacccacacataaaaggtggtaactgtgt

SEQ ID NO: 3033 - DNA, 278 bp, synthetic construct
  misc_feature 1..278: note = Description of Artificial Sequence: Synthetic VEGFA target binding site sequence
  source 1..278: mol_type = other DNA
caaagacagtagatcttaaatgtcctcacgttatttagagacagagtctcactctgttgcccaggctggggtgcagtggtacgaactcggctcactgcaacctccgtctcctgggctcaagtgattatcctgcctcagcctcccgagtagctgggattacaggtgcccaccaccacacccggctaatttttgtattttcagtagagctggggtttcaccatgttggccagcctgttctcggcacacactcacccacacataaaaggtggtaactgtgt

SEQ ID NO: 3034 - DNA, 67 bp, synthetic construct
  misc_feature 1..67: note = Description of Artificial Sequence: Synthetic VEGFA target binding site sequence
  source 1..67: mol_type = other DNA
gattgcctttactccatgcctttcttcttctgctctaactctgacaatctgtcttgccatgccataa

SEQ ID NO: 3035 - DNA, 58 bp, synthetic construct
  misc_feature 1..58: note = Description of Artificial Sequence: Synthetic VEGFA target binding site sequence
  source 1..58: mol_type = other DNA
gattgcctttactccttcttctgctctaactctgacaatctgtcttgccatgccataa

SEQ ID NO: 3036 - DNA, 61 bp, synthetic construct
  misc_feature 1..61: note = Description of Artificial Sequence: Synthetic VEGFA target binding site sequence
  source 1..61: mol_type = other DNA
gattgcctttactccatgcctttctgctctaactctgacaatctgtcttgccatgccataa

SEQ ID NO: 3037 - DNA, 61 bp, synthetic construct
  misc_feature 1..61: note = Description of Artificial Sequence: Synthetic VEGFA target binding site sequence
  source 1..61: mol_type = other DNA
gattgcctttactccatgctcttctgctctaactctgacaatctgtcttgccatgccataa

1.-28. (canceled)

29. A complex comprising:
a Streptococcus pyogenes Cas9 protein; and
a Streptococcus pyogenes gRNA molecule that includes a complementarity region at the 5′ end of the gRNA consisting of 17-18 nucleotides that are complementary to 17-18 consecutive nucleotides of the complementary strand of a target sequence, wherein the target sequence is immediately 5′ of a protospacer adjacent motif,
wherein the gRNA is a single gRNA, and
wherein in the presence of an S. pyogenes Cas9 protein, the gRNA complementary region binds and directs the Cas9 protein to the target sequence.

30. The complex of claim 29, wherein the Cas9 protein is a catalytically active nuclease.

31. The complex of claim 29, wherein the Cas9 protein is a catalytically active nickase.

32. The complex of claim 29, wherein the Cas9 protein is a catalytically inactive Cas9 protein.

33. The complex of claim 29, wherein the complementarity region of the gRNA consists of 17 nucleotides.

34. The complex of claim 29, wherein the complementarity region of the gRNA consists of 18 nucleotides.

35. A DNA molecule encoding the complex of claim 29.

36. A vector comprising the DNA molecule of claim 35.

37. A host cell expressing the vector of claim 36.

38. A complex comprising:
a Streptococcus pyogenes Cas9 protein; and
a Streptococcus pyogenes gRNA molecule that includes a complementarity region at the end of the gRNA consisting of 17-18 nucleotides that are complementary to 17-18 consecutive nucleotides of the complementary strand of a target sequence, wherein the target sequence is immediately 5′ of a protospacer adjacent motif,
wherein the gRNA is a CRISPR RNA (crRNA), and
wherein in the presence of an S. pyogenes Cas9 protein, the gRNA complementary region binds and directs the Cas9 protein to the target sequence.

39. A vector comprising a DNA molecule encoding:
a Streptococcus pyogenes gRNA molecule that includes a complementarity region at the end of the gRNA consisting of 17-18 nucleotides that are complementary to 17-18 consecutive nucleotides of the complementary strand of a target sequence, wherein the target sequence is immediately 5′ of a protospacer adjacent motif,
wherein the gRNA is a single gRNA or a CRISPR RNA (crRNA), and
wherein in the presence of an S. pyogenes Cas9 nuclease, the gRNA complementary region binds and directs the Cas9 nuclease to the target sequence; and
a promoter.

40. The vector of claim 39, wherein the promoter is a constitutive promoter.

41. The vector of claim 39, wherein the promoter is an inducible promoter.

42. The vector of claim 39, wherein the promoter is a weak promoter.

43. The vector of claim 39, wherein the expression vector is a bacterial expression vector.

44. The vector of claim 39, wherein the expression vector is a eukaryotic expression vector.

45. The vector of claim 39, wherein the promoter is an RNA Pol III promoter.

46. The vector of claim 39, wherein the promoter is selected from an H1, U6, or 7SK promoter.

47. The vector of claim 39, wherein the promoter is a T7 promoter.

48. A host cell expressing the vector of claim 47.
